United States Patent Application Publication US 2026/0191916 A1 - sequence listing, part 8

SEQ ID NO: 11 - DNA, 3147275 bp, Longibaculum muris (residues 1-1,573,638 of 3,147,275)
  source 1..3147275: mol_type = genomic DNA
atcatatacaacaataagggtcaatctgatccttatttttattataaataagaaaatttaaagcataatgcgtcataaaacatttaaataaaaccatatttataaattgacaataaataaaatttatgagtatcattaatatgaatcaataaaaaatatctcataggaggaaatagaatgtatcaatacaaatatgtaagaatcactgttcaaagtcaaggttatggtctgattaatggcacaagctatggaattggagaataccgtcaaattattgatagttgtgctgctagtgggtggcgctatgttgggtatattccagttaaacaaaggggaacagggcatattgaagaaatggatcttatttttgaaaaagaaatatacaaacatctaagaaatgatgaaggctgatgattttcattggtataaagatttctctatgatacaatgatgttaataaggagcttaaacaatgaaaattttatttaacatatgtaaaggattatctattggattaacaataggagcactcttaggaacagtgaagtggttcatggccaaggcatcatataccccacaacaagtagaaaatataaaaaaattatttttgcaattttcaaagtttttaaaagtatttacttttttattattaggattagggtttatttggtgttgttattttttagtattgggtattgtttctccaacacaatctgattatgctagtaatatggctgaattaattgtagcagtattaagtgttatttctattctatttgcttttgttgaatttacgaaaagagataagtcgtgatgaaatataaatgtttagttttagatcatgatgataccattgtcaatagtacagctacaattcattatccagcctttatagagtctttaaaaatattgagaccacatttgactttaactttagaagaatatttttattataattttgaaccaggattcagtgctttctgttatgatgttttacatttaacacaggaagaaatggaatttcaaactcaaaattggttgacctctgttgatcaaaatattcctctagtttatgagggcataaaggaaatcttatgggatttcaaaaatgcaggaggttatatttgtgttgtttcacattccatgaaagaaaatattatcagagattacaaagccaatcatttgcctatgcctgatcttgtttttggttgggaacagccagcccaacatcgtaaaccatcaccttggccactagaaaaaattaaagaagaattccagctttcatcacaagatatggttatgattgatgatttgaaacctggaaaaattatggctgaactggttggagttgattttattggagcaggatgggcccatgaaatagagcccattcgtcactatatgcaagaagcatgtctttattattgtaagaatgtaaatgaactgaaaaaaattctttttgatgacgaataaaaacttgttattaatgatagatgattaaaaaaagaaagggaatgaatgaaatatgaaaacactctatgtctctgatttggatggaacacttttacgaagtaatgaaacattatctgaatatacgagtcaaactataaatcaacttgttgaagaaggcatgctattttcttatgcaacagcacgctcttataatacagcacataaagtgacaaaaggatttcatgctaagattccattgattgtttataatggaacttttgtcaaagataatgtgacaggtgaaattttgttgtcctatgattttcctgataatatttttcaggttttagatgatttattagcacatcatatttatcctattgtctattatacagttcaacaagaggaaaagttttcttatatcaaagataaatcaactgaggcaatgaaagcatttcttaatacgcgcaaaggtgattctagagattgtccaattaatcatgaaaaggaattttatcaaaaacatattttttatattacatgtattgatgaagaagaaaaacttttacctttttatgaaaaatatcaagatcaataccgttgtatctttcaaaaagatatttatacaaatgaacaatggttagaaattatgcctaaagaagcgtctaaatcaaatgcaattatgcaattaaaagattatcttcattgcgataaagtcgttgtttttggtgacggactaaatgatattgatatgtttgaaaaagccgatgagagctatgcagttagaaatgctcatcctcaactgaaacaacttgctactggagtgattgatagtaacgatgaagatgcagtggctaagtggttattattgcattatacaaataataaatgaaaagggggaatttgatgttttgtgattatcatgttcatagtatttttagtgatgattctaactatgagatggaaaagattgttcaagatgcaatagcattaaaaatgcaggaaatatgttttacagaccatgtagattatggaataaaaaaagattgggatgatccaacctgtaatgaaaaagcagttcttaatgtagattatccaagatacttccaggagatagaaagattacaagaaaaatatcaagataagattatcattaaaaaaggacttgaatttggaatgcaaagtacaacaattcaagattttcaaaaactatataataaatatcctatggattttgtgattttatctgttcatcaagtcaacaatcaagaattttggacttatgaatttcaaaaaggacatagtgaatatgaatactatcaagcttattatcaagaaatgtatgatctcgtaaaaaattatcatgattatagtgttatcggacatatggatatgttaaagcgttatgatgatcatgatggttatccagcttttaaacaacataaagatatcataacaaagatattacaaacagttattgcagatcataaaggtattgaattgaatacatcatcacgacgttatggtttagatgatcttatgccatcaactgatatcttaaaactttattatgatttgggtggaagaattttaacaattggtagtgattcacataaaaaagaagatttaggggcacatatagaagctttaaagaaggaattaaaagcaataggttttgaatctttttgtacctttgaaaaaatgaaacctatttttcatcctctataagttcgtcattatagaaaaaccatttatctttatcataacaaatcattgaaaatatttgtttaagtgatgaattaggaaaagaaatatcaagattgatgcttcacattatcccaatattcaaattgtctcatttcatgattcatgttctgattgttataagggactcttggctgagggtttaagaaaattcttttgtgatttcaagattatcaaacagttaatatgaatccccaataacaatatgttttattgtttagatacgctatcaatctctcattattgattgaaaaagtggattttaaaaaatattaaagtgttttatgaaatatattttcattttataaaaaacaaagattaattttacaaaatcatgtataataaaaacagctatagcaatttaaggggatgtgggaaatgacaaaacaagaaatcaatatcttagttcgtgaactgaagaaaatatttgatattgttcgcttggttgatgtaacaattacgacgcaatattcattagataaaaatggtgagcttattgaagaaccatttcgttgtttttctgtttggaataaaaacgaacgttgtgaaaactgtatttcagcaaaagctttttcacaaaagacacagatgacaaagtttgagtttattaatcatgatgtttatcatgttatttctaaatatgtggagattgatgggacaccatatatgttagaaatggtatctaaattaagtgatgaaacattatttagtgcctatggacaagaacaatttgttgatacaatttcaacatataatcgtaaattatatgttgattctttaactggtgcgtataatcgtcgttattttgaagatcagttgttagggttaaaaaacgaacatgcagtggctatgatggatgttgataattttaaaatgattaacgatacctatggtcataaagctggtgataaagcattaaaaacaattgtgaatacaattcaaaaaaacatgcgaaatacagatgctttgatacgttatgggggagatgagtttttaattgttttttctgatgttgctgtggatgtttttggatgtcgattagaatctattagaaaagcggttcatgaaattgttatggatgaatatcctcaacttcgtctttctttaagtattggaggaatttattctattaacgaagatattgattttatcaatgaagcagataaaatgctttatgatgctaaaaaatcaaagaatgttgtaagatacaaaacattgaattaaaatcagaagaaactctgatttttttgtgaattgatggtatatgtagtaattctacattatttgcgttatacttgagatgaaaaagaaatatatgttaataaaacaaggaaggagtcgctatatggaatatcaatatcatgaaattaatcatatgataaaaaatctttcctgtttttttgatgttgtgagacttgtagatcctattcactgtcatcgtattgaagtagatcaaggtataacaagaaaacaaaagaaatgttatgaagtatggaacaaaagtgatcgctgtgaaaactgtattagttatcaagcttatcagcaacaaaaaagattaacaaaatttgaattattaaatgatgaaatttattttgtgatttctactcctttacaaataagattagctgatgattcactttatagctgtgttttagaaatggttgtaaaaaattctaacaagattttaatgggacatcttaaaaataatgattattttgaaaatattattttgtatgaaaaaaagctttatgaagatgctttaactcaagtatataatcgtcgtttctatgctgaaaaatcattctgttatggatattataatgaccgccatgaaattatttttattgtgactgatttaaaaggttttaaacaaatcaatgatcaatatggacatattgtaggggatacaattctttatgaaacagctcaattaatttcaagaaccattcgtaaacaagattatgtgataagaatgggtggcgatgagtttttaataattcttgatcatagtgatgaagaaggagctagacgtgttattgatgaaattaaagaaaaatcatgtcatgaattgatttatgatcatgtagaaaagaaacatgttattttaaattttgggatggcctatgatgctgattttgatggcagtgatgaaagtattaaaaagttgtattatgaagctgatcaaaatatgtatcatgataaaaagattaatctaaaataaaagacttgcaaaagtcttttattcatgtgtatagtctaaaatttgaattttctcacctaaatcctttttcactaactctttcatctttcttgcaaaaggacaaggataaccaattggagttcctttaccaatacaagaagtaaaagcaattgtatctgctccacgtttcacaagttctcttgctcgtaaaatagcgacttttccaggacaaccgccacaatcaataaaaccaatgatttctatatcttctttaacataagaaagagcaccacttttttctttgatggtttgaaaatctcgcgtaccaggacaaaaattttctgtctctttacaacgaattaatcctaatttcataaaatcatctcctcatacaatggagtatagtcttttatgaaataatgtcaaagtatatgcactatcattaatgaaaggaaatgaaatatgatattaacaagtaccagacttattttaagacattttcaagagggtgatgaacaagctctctttgatttacttagtgataaagaggtcaatacctttttaccaatgtttccctttcaaaatcttgatgaagcgaaacattatctcaaagaacattatttagataaatatcaaaaaaatttaggatattactatgcaatttgtttaaaagaaaataatttaccaattggttatatccaaatgagtgaaagtgcgagtcatgattttggttatgctttaagaaaagaatattggcatcaaggaataatgagtgaagcggcaacaatctttatggagatgctaaaacaagaaggcgtttcttttataactgccactcatgatgttttcaatatcaatagtggtaaagtgatgcaaaaaataggcatgacctatcagtattcttatactgaaagatggatgcctaaagataaagatgttacatttcgtatgtatcaatccaatttcaagaaaccacaggattgggtttatcttgaatactggaataaatatcctcattatgttgaagaattataagggtttgtttttcttagcttcaatcgcttttttgtaataatcacatttatattcaatatgatttaatatattttgtaaatcagccatttgttgtttaacaatttcacgacgttgataaaacatctcttgacgtttttctaatgtatcatcgccctctaaacaccattgactaaagattttaatatccttaatcggcatacctgtttcttttaaacattcaatcgtttttaacatattgatatcttcatcagaaaactgacgtattcctgattgacgttcaacaaaaggaagtaaaccttctttatcataataacgaattgtcgaaggtgttaggttaaacattttagcaacttcaccaatagtataatacattttatcttcctcctttctatacattaagtatagcatggaggatttttttatcaatcattattgacttaaagttaacttcaggtgataaaattgaacacggtccttattttctgtctataattgttggcgtaaaatctttagaaaatattgtgaagctcgtgaaaagacttgatattttttccagacaagtgccattccaacggttaaagtaggtgatagaggacgaaaacatagcgagctatcacccgttgtattaaccagtttatccaaacataaagcataacccattccttcttcaaccattaatgaagcattataaataaggttataagtagcaatgatatttaacttttcaaattcaccattcatccaaccagaaagttcattattgaccatttcttgcctcgaacaaatgattggctgatttatcaaatcatcaggtgtaataacatcaagttgagccaatggactatctttacgcattaaaacaccccaagtatcataagccggcaatttaatgaaatcatatttagacatatcagcaggatcaagaataatgccaaaatcaatcaatccattatctaatttttcaatcacatcttgtgcattaccgctataaagatgaactttgataagtggatgaatagattgaacttgttgaacagttcgagcaataaaacgcattgcatctgtttcaccaccaccaatataaatatctccctttagtatcgattcatttgccatcatttcaagttcagtcttttctacaagattcgtaatttcctcagctctttttctaagtaacataccatcttctgttaaaataatcttacgatttccacgaataaataaagtttttcctaattcttcttccaactctttcatttgtcttgaaagtgtgggttgagtaatatgtaaatattcagcagcctttgatatattttcttcacgcgcaatcgctaaaaaatattgtaaaactcttagttccattatcataacctcctatttttattatatacaatttcatatgcttttcaagcatagcaaattatttgatataggtatttgatatttgtaagttagagacataaaatagaagcgaggagtgatgaagaagaaaatgaaaaaccaagatataacaatttgtttaacagatgctggctgtcagcttgatatgattcaacagtttctagaaaaagaagatcaagatcaaagattgattttattaaaaaaacataagtgttgtttattagaaaagctacatatgattcaaaaacaaattgattgtttagattattttatatatacattaaaaaaggagaatcaagaatgaagaaaaatgttttagtgatttcaacaagtcaaagagttaaagggaattctgatactttggcacaatctttttatcaaggcgcaaaagcatctggtcatcatgttgagatgatttctttagctcatcaaactatctcgttttgtaaaggatgtcttgtttgtcaaaagtcacagccatgtgtgattcaagatgatgcaaatgcaattgttgaaaaaatgcagaaagccgatgttattgtgttttcaacaccgatttatttttatgaaatgagtggtcaaatgaaaaccctgattgatcgaacaaatcccttatttataaaagattatcaatttagagatatatatttgcttgctacagcggcagatgaagatgaatcagctatcgatggagcaatcaaagggttagaaggatggattgcttgttttgaaaaatgtcagttaaaaggggtcatcaaaggtgttggggttgatcagtatggtgaagtaaacaatcatcaagaacttttagaaaaagcttatcaaatggggaaagagattgtatgagaaaaattcttttactttgtttagccgcttttatttttttaagtggatgttcaaagacatctcaagcaatcaaacaaacaccccgtataaaggagtgtgataagatgtatatgcgtattaatcaacatacttttgaaattcatctttatgataatccaacagttcaagcattgaaaacttatttacctatgagtgtgacaatgaaagatttacatcagaatgagaaatatcattattttaatcaatcattacccactcaaatcgaagatattgattatatccatacaggtgaattgatgttatttgaaacaaactgtttggtattattctatgatgatttttcaacaaattatgcttatacaagaatcggatatattgaaaataatgatgaaattaaaaatatattaggagaaggtcagatagaagttgaatttctgcttgatgattaaggaggaaaaatgatggaacatataaaacaaaactatttaagtggagaaagagcactttttaaaagccaaggattaaaaattgaaaattcagtctttgccgatggagagtcacctttaaaagaaagcaaaaatcttgatatcaatcaaactatattcaaatggaaatatcctttatggtactgtcaaaatgtaaaagtaaagcattcaacgcttttagaaacagctcgttcaggaatttggtatacgcatcacattgatatcagtgatacaacaattgaagctcctaaaacattcagaagatcaagtgatatatatttacacaatgttgacatgccacttgctttagaatcattatggaattgtcataatgttaaacttgaacatgttcaagcaagaggagattattttggaatgaatagtgaaaatcttgtggttgatcatttacatttaacaggaaactattgttttgatggtgggaagaacattgaagttcatgattctatattgatatctaaagatgctttttggaattgtgaaaatgtgacagtttatgattcaacgattattggtgaataccttgcctggaatagcaagaatgtgacttttattaattgtactatcgagagtttacaaggattatgttatattgaaaacttgaaaatgatcaattgtacgttgatgaatacaactttagcttttgaatattgtgaaaatattgatgtagaagtgatttcgcatgttgatagtattatgaatccaatctctggaacaattaaggttcaaagtgttggagaattgattatggatgagacaaagattgatcctcatgctacacaaataattacgaatgacgcttttgtttctcaagaaaaaacgagagaatgtgtttgtagttagggaggaataaaaatgagttatgatttttcaaaacttacaaatcgctttgatagttattctatgaaatgggatgtagcaccacaagtacttccaatgtgggttgcagatatggactttgaaacggctcctgaaattgttgaagctttacacaatcgagtgaatcataagatttttggttacaatattgtaccagatgaattttttgaaagtattcaacattggtggaagaaaagacatcattttctaatggaaaaagaatggatgatgttttgtacaggggttgttccagctatttcatcaattgtaagaaagttgacaacagtgggtgagaatattttaattcaagcaccagtctataacattttttataattctattttaaataatggacgacatgttttatcaagtgatcttatttatgatggacatgaatatacaatagattttgaagatttagaaaagaagttagctttaccccaaacaacaatgatgattctttgtaacccacataatccgattggaaaaatatggagtcaggaaacattaaaaagaataggagatttatgtgctcgacatcatgttttggttgtctctgatgaaatacattgtgatattattgcacccggtagggaatatattcctttcgcgagtgtctcaaagaccaatttaaataacagtattacatgtattgccccaacgaaagcctttaacttagcgggcttacaaagtgcctgcatcgttgttgaaaatgaggtaataaggcaaaaagtcaatcgtggaatcaatacagatgaagttgctgaacccaatagctttgcaattacggctgcaatgagtgcctttaatcatggtgagaaatggttagatgaattaaatatttatattcaaaataacaaacaaatagcatgtcagtatattgaagaaaacttacctatgttacatgttgtttacagtgaagcaacttacttgttatggattgattgttcaaaagtaacagatgatagtgttgaacttgtagaagctattaagaaaaaaacaggactatatttatctgatggatatgaatatggcgaaaatggcaaagcttttgtgagaatgaatgtagcttgtcctcaaatgcgattgatggatggacttaagcgtttacgtgaaggagtgattgattatcaacaaaatatgaaatagagtaaaaaaagccttgccttagagttaactttaagttatataataatgatatgaggagagtgaaaaaatgaatcaaaagaaattaggttttggattaatgcgtttaccatcattagatgaaaatgatccatcaaagattgatcttgaagaaacaaagaaaatggttgatacttttattgaaagaggttttacttattttgatacagcttggatgtattgtggatttcatagtgaaaatgcggcaaaggcagctttagttgatcgttatcctagagaaagttatacattagcaacaaaactacattccggttttattcataccaaagaagatcgtgatcgtatttttaatgaacaattatcaaaaacaggcgttgaatattttgattattatttattacatgatattaatacacatagtattgaggtttacaatgaattagattgttttaattggattattgataaaaagaaacaaggacttgtaaaaacaattggtttttcttatcatgatggacctgaattattagataaagttttaagtgaacacccagaatttgaatttgttcaattacaaatcaactacttagattgggatagtgtgggagttcaatcaagaaaatgttatgaggttgcctgtcaacatcataaaccagttattgtcatggaaccagtaaaaggcggaacgcttgctaaagtccctcaggaagttgaaaacatgtttaaaaactatcatccagaaatgtcaattccttcatgggctattcgttttgcagcaagcttagataatgtcatgatggtattaagtggaatgagccatatggatcaattattagacaatacaagctatatgagtgatttatcaccattaaatgatgaagaatatcaattgattcatcaagctgtcaatatcatcaattcaaccattactgtaccttgtacaggttgtgcatattgcgttgatgggtgccctatgaatatagccatccctaaatatttttcattatataatgctgatttgcaagaagttgaagaaaaaggctggacaccacaaggcgaatactatgctaatttaacaaaaacatttgggaaagccagtgattgtattgcttgtggtcaatgtgttggagtttgtcctcaacatctaccaattattgaatatttacaagatgttgctcaacactttgaaaaataaaatttttaggaatattaaaaatgagaggtatgtctctcattttttattgcttatttttaaagttttctccccatacatacatagcatctaaaattggctttaaactcatccctaattctgttaaagaatattcaacatggggagggacttcagcaaaaacatcacgcttaaccaaaccattagcttccatatctcttaaattagaagttaaaaccttttgtgaaatatgtccaattgatttttttaactcaccaaaacgctttgttccagtaagtagttcacgaataatcaaaactttccaacgattactaatcagtaacagagttgtttcaaccggacaagcaggcatttgattttccatttttcaacctccttagtatcaaaaagaaactataaaacaaaattgtaactactttacaattcatctctttcatcctattataaacttatcaagacatcaaaacaataggagaaaaccatcatgaaccaacaagaaagattagactatctactcaaatattttttcaatgaacttcatattgaatattccaaaaaacaaattcaaaatcctcacgaaacacttcgtgctcttatgaatatccgtccacctcaaatggctgataagaaaactcaagaaatactagatgattacttacataccgaaattcaaaacaaaggaattataaaattaagtgatttaaagccaatgaaagatcatttgtatttatatcaaggagatatcacatgtttaaaggttgatggcatcgttaatgcagcaaattcacaaatgttaggatgttttattccttgtcatcattgcatcgataatgccatacatacttatgcaggtattcagctaagaaatagatgtgatgaactcatgaaacaaagaggaaaacctttagcaactggagaagcactaataacattgggttataatttaccaagtcattatattattcatacagtaggacctatcattgataagcaagtgactttaaaagatgaagaattgttaagatcatgttatcgggaatgtttgaatttagctcacgcttatcaacttcaaagtctagctttttgttgtatatcaacgggtgaatttcatttccctcatcaattagctgcgcaaattgccctccaagaaattgaaacatttttaaaagaagcttcaatggatattgtcataaatgtatttaaagatgaggatttgcatatttaccaaaaattattaggagaataaacatggataaaattttaaaaatcaaacaagcattgacacaagctgatgcgattgttattggagcaggggcaggattatctacagcagcaggtttatcttatcagggagaagatttccaagaacatttttctgattttattgcaaagtatcattttcaagatatgtatacagccggtttttatccattttcaactttagaagaatactgggcatattggtctcgtcatatttattatcatcgttatgatcaaccttttagacaaacttatttagatttattaaagttagttaaagataagaattatttcatcatcacaacaaatgttgaccatcaatttcaaattcatggctttgatcatacccgtttattttatacacaaggggattatggattgtggcaatgttctcgtccatgccatcaacaaacctacgataatgaactgactatcagagaaatgatgcaaaaacaaaagaatatgaaaataccaacagatttgattccttattgtccatactgtggggcacctatgacaatgaatttacgcatagatcagacctttgttgaagatgcaggttggcatcaagccaaagcccgttatgaacaatttttataccaatatcaacaaagcaagattgtttatttagaaatgggggttggctataatacccctggaattattaaatatcctttttggcaatttacaaaatcgaatcctcaagccacttatatttgtattaatcaagaagatatcagttgccctgaatctatttatcagcaagctattttaatgaaagccgatattcatcaagttatagaaagtcttttaagtgattaaatttcatctcactagttttcattgtttacgaatcacttataaaagaaagtcaatgaatatgctaatgtattgaattggactttcttttttcgattggaaatagtaaaataaaaacaagggaaggtgagaggatgatagcactagcaagtgattttgatggaacaatttattttggtgaaaaacaaggcttttatcaatcggatttggatgcaattattgcttttcaaaatgctgggaatctatttggaatttgtacgggacgacctctcgtaggtattgaaccagtaatgcaaggaaaaattgatttagatttttatattttaagtagtggagcagtggtcttagataaacatcaaaatattctctataaaaaatgtttacctagagaagtattcaatgagatttatgaaacttatcaccaggatgttgaaataggcattcaggcaaatcaaaaaatgtatgcttttcatcaattaaagatgccaatggaacaaatcattatttcttcaccagatgatataaaaggtgatgatattttttgtttatctattgatggcaaaaatgaagaaaatgcagctaaaatatgtcaagatattacgacacgttttggagatgttgttgatagttatcaaaatattgaatatattgatattgttgcaaaagggtgttctaagggtgaggcaataaaaaaatataaagcaattcaaggaattgatgtaattggaggaattggtgattcatacaatgatttgccaatgttagacaatgttgatcaagcattttcatttttccgttcaccagcaattgttcaagaatctgctgatcatctggtttatagtgtttgtgatgcacttatgatatttatgaatgaacgatgaggaaactcatcgtcctttgcattttgatataaaactgtttttctttatttatttcgtgttataataggaaagaaagaagaaggaggatagtggtcatgttaaaaaaaatatctctatgcatcataacattatcattatttctttttggctgtcagtcagaaaaaaagaaatatcctagtgaatatccttcttcaaaaagttatagtgaaaaggatattttgtatccacaaaattcaaaacaacagattttatcatcttctattgcaatcgttgattattcacataccgatttaggatatatcatggcatatttaagtcatgaaaataaaaagcgtgtgaaaattcagattacatcttcacaaaatgaacaaacatataattatgatttagtcagtttagaacccattgcttttcctttacaaatgggaaatggaaaatatatgattaaaattctagaaaatattcaaggaaaacaatatgcgattgtgaaaactctagaaatagatgtgcaaatcaaagatgaattatcaccttttctttatcctaatcaattggtaaattatcaaaaaggtgattcaataactcataaggccattgaagttgtgaaaaaggatgataatgatttacaacggatcaaagatatctatacttttgtagctgattatttaacttatgatgatcaaaaagctgcagaagcaaatgaaaaatatatattaccagatttaaatgaattattaaaagtaaaaaaaggaatatgttttgattatgctgcactgatggttgctatgttacgaatcaatcatattcctgcgcgtttgatttgtgggaatacagatgttgaatatcatgcctgggtagaagtttatttaaaaggaaaaggctgggtgaatccagatatatttatggatgaaaaaacgtggacaagaatggatccaacatttgcgagttctaaatttgactatgatggtcaatatgatgcaatctattattattaggaggatgaaaagatgaaattaagctttgaagaaaaagaaacttttgccaaatcaatggcattgattataaatgctggttttgatatttatcaaggaattgatatgattgaacaatcagaagataatccccgattaaagacagttttaaaagaagttttagaaaacttacaagaagatacaactttaagccaagctatctcaaaaactcaagcttttgatgattatatggttcatttattagaagctggagaaatcagtggacatttagatggagtcatgtcatcattatcagattattatcaacgtatgaaagatatgtcatcatctttgaaacaggcaatcacttatccaattgttttattattgatgatgcaagtggttgttggagtcattgtttttaaagttcttcccatctttcaaggcgttttaaaaagtcttggtggagagctttctacttatgcttatacgtttatgaaatgtggtcagattttttcattcatgggttttttagttttaaccatagtctttataagcttaatttctattttcatttatgccaaaatcaaacatgttgatttattaagtgtctttatttatcgtatgccctttatgaagaagctttcttatgctttaagtcatgctcaaatgacctatgctttttcgatgtttatatcaagtggttatgaatttgaagatgctattcaatatactctccctttaattgaagaaaagcaattaaaagaaaatcttcaaaaatgtctggttgatttacaagcagatatgccttttgaagaaaccctcgcaaataatcaaatctatcatggtatgaaactcaatatcttacaagtgggaattaaaactggtcaagtcgatcaaatctttcagcaattatcaatgacttatcaagatgaagtgaatgaatccattgctcattttttaaatgttattgaaccaacaatggtgactttcttatcagttattgtaggaattgtattactttcagttatgttaccaattgtgagtattttatcatcattgtaggtgaatattatgaaattattattgaaatgtttatttattctagcttttgtggttttggttgttttaggggtacagtatgctgatgagtattctaaggatgaagatttaaagagagtaaatgatacaatcttacaattaagtttaaaatgttatagtattgaaggaaagtatcctcaagatattgaatatttaaagaaaaattatggcttattggttaatgaagatgattatcatattctttatcattttgaaggagataacttaaaaccaacgattagagtctatgaaaaggagaatgattatgagtagacaatcacatattcaatccttaatgaatttattattgattctcatctttgtgattggttcattctttatcatatcgagtgaaatacaaggttatcaaaatattcatgaaagtattttacaacaagaagatttaaccattcccttatcctatattcataccaaacttaaagaaaatgaaaatcagcaaatgattcaagtcaaaacaatcaatcaacatccttgtcttattattcaaaaccaaaaaacaataacatatatatattatcaagatggttatttacaagaaatatatgctgatagtcaatatacaccactctttagtgaaggcgaaaaactttttgcaatcgatgattttcaaatttcttatgatcatcagctttatacttttattgtgacaaaacatcaaagaagtgaacagttaactgtttatatacatcgttaggaggagagtttatgaagtcaaaagaacattctttttcatatttaatggaactgataattgtaatcttcttctttgctatttcaacaacattctgtgtcacttttattgttcaagcaaagcagcgtcaagcacaagcaacatctttatcgcaaactttattaaaagcagaaagtatgattgctacgatgcaggcccatcccaagattgctccagatcaactatttgatgttcaaaagattgatgattctacttatcaaggtgaccatttttcgcttattatctatcaagatgaagtgaaacatggtgtcattaaaatttatgaggatgataaatgtttaaatgaacttccttttgtgattggaggaaatcatgatgagtaaagaaaaacaagaatttcatatgagtattggagctccaagtatatttatgctttttgtggttttagtcatgttgattttagctacccttgcttcattaagggcacattcatattatgagtcaaccttacgacaaatgaacttaacaaaacaatactatcaggcacaatctcatcttttgacagtctatgaacaattagagccaaaagatattgaacaacaattaaaatcaaagaatattcattatatttatcaaaatcaaaagtattgcttgattgattcgattaatgaagatcaggatttaaaattaacttttcaagtgcaagatgaaaatctacacattgtttcttttcaaacagaaaataaggaggtagaggatggaaactagaaaattattagaagatgtcatcacaatgaatgcatcagatgtctttattattgctgggtcgccttgtgcaattaaaaaagatggccatattgagatgtataatgatataaaattatcacctcaagatactgaaaatattattcgtgaaatatatcatattgcccataaagatgatattgataaattgatagaaataggggatgccgatttttctttttctatttcaaatgttggtcgttttcgtgtaaatgcttataagcaaagaaactctttatccgcggttatccgtgtggttcaatttgctttacctgatcctttggctttacatattccaacatcattaattgatttatcaaaggctaaaaaaggaatggttttagtgacaggtccagctggaagtgggaagtctacaaccttagcttgtatgattgatcaaatcaatcgtaatcggaacacgcatatcattaccattgaagatccgattgaatatttacatagccatcaaaaaagcattgtttctcaacgtgaagtctatcatgatacattagactatgtttcggctttaagagctgctttaagagaagcaccggaagttattttggttggagaaatgcgtgatttagaaactattgaaacagcgattacagcagcggaaaccggacatctgattttatctagtttacatactgtgggtgtcgccaatacgattgatcgtattattgatgtttttccttctactcaacaacaacaaattcgtgttcaattatcaatggttttaaatgcagttgtttctcaacagctattacctagtgttgatggaaaaatgattcctgtttttgaggtcatgatatgtaatcaggccattagaactttaattagagaaggtaagacacatcaaatagataatgtgatagcttctcaaaaacaagctggaatgataacaatggatgatgcaattgtagagttatataaacagggaaaaataagtcaggaaacagcacttatgtatgctagtcatccaggcaatatagaaaagaaattataagtagtaaatatattatgttataacttttcagatttgttttattttgttatggaatttgtgatattttagagtataataaaatgtgggaagaaattgatgataggtaagcaactcaatacttaaaaaagaatggagatgaatttatgaaaaaagggacagttttaaatgtccatacattaggtaaattaaaaatttcatgtggtgatattgtttttccattagaaagacaaagaagtgctcaagttgaattactgattatctatttaatattaaatagagatcaaagcttaaacgctacacgtttgatagatttcttatggccaaaggggaattctgataaaccagaaggggctttaagaaatttggtttatcgtgctcgtaaagaaatgaagcgtttttgtgatgatataagctgtattcaatctttaggcaaaggatataattggaatctagaagttgagtgtaaagttgattatgaagatttagtgaaacttgctaatcgtattcaacaggaaaaagatgtttcaaaaaaatatagccgatgtctacgtttattagaaaaatatgtcaaccaattcctaccagaattcttagataatccttgggttgaacaaatgaatagaacattacacacgcattgtttagaagcttttattgatacacttgattgtttattagaagcaaaacgatatgaagatgtcttaaaattaactgaacatttaaatgcacaacaattctctgatacaaagatctatgaagcaagactttatagttattacaaaacgaatcaaattgatgtagcattagcatattatcgtcaaaatatagacacatattttcatcaaaagggaataccaatgtctgcaagaatgacggaaatttatcagttgattttaaatactattccttcttctgaaatcaatgttgttgaattagaagataatcttgttggtgataatcattctgattctactttctattgtgactttgatgtttttaaaaacatttatcaagttaatctacgttcagcaaagcgttcaatggatgcacgggttttagctttacttactttaagcgattctaaagattgtttatctgaacaagaagttttagaagaagttgacatattaagagatgttattgctaagagtctaagaaagaatgatgttttttttaagtttaatatgactcaatttgctttaattgttgcttctcatgaaatcgatggtgcaagtatcgcggttgaaagaattcaagaggaatataataagcagaagaaacaccctgaaatgattttaaaatctgagttgaaaaaaatattttaaaaaatggccatcatgatgatggtcattttttatgcgattttttccattctttgatttgttgtaggcgtaaagcaaccttggcttcacttccctggttggttggctgataataagtacggtcacttaaagcttcaggcaggcaagtcatagtggttaatttatcagcatattcatgagcatattgatagcctttaccataatttaaatctttcattaattttgttggagcattacgtagatgcaaaggaactccttgagaaagagtttctaaggcatccttttttgctttttcataagccatatataaagcatttgatttgactgataaagaaagataagtaacagcatgggttaaatggacactacattcaggcatacctataaaatgacaggcttgataacaagcaacagcaatctgtaaggcatgactatcagccataccaatatcttcactagcaaaacgaacaagtctccttgctatatataaaggatcctcacctgcttctaacatacgtgctaaccagtaaattgccgcatcaacatcactattacgcatggatttatgtaaagcagaaatgagattataatgttcttcaccttttttatcatagagtaaagatttatgacttgtacattgctcaacaatttctttagaaacaagcgttttttgattttgtctttctccattaaaaacagccatctctagtgtgttcaaagcaactctcgcatccccattagcaaagcttgcaatcatgtaaagtgtatcttcatcgatttggatatcttcatttttaaaccctcgttcatcatttaaggcatgatgtaaaaggtctaagatatcttcagtttctaaggcatgaagaacaaaaactttacagcgtgatagaagtgctgaattgatttcaaaagaaggattttcagtggttgcgccaattaagacaatgcttcctttttcaacataaggtaaaaaagcatcttgttgtgctttattaaaacgatgaatttcatcaacaaaaacaatagtctttattcctaatgcttgtttttgacttgcttgtttcatcacttctttaatatctttaatcccacttgtaactgcagaaaaattaataaattcagcttttgaagtttgagcaataatttgcgcaagagttgttttcccaactcctggagggccccaaaagatcatggaagatatttgatcattttcaataaattgtcttaaaagtttccctttgcctactaaatgtttttgaccaacataatcatctaagctttgtggtcttaaacgattggctaaaggggcttgattttgaaataatgatgtttgttgcatgataccaccagctttcttggtagtattgtagcactttttttaaaaactggctatggtagaaatggtaaagataatcaacaaaaaattattttgtgacgattttgttattttgttgttattttgatataacaatattataataaatatagggaaggtggagatttttgatgaaaaaagccaaattgctctatatttttctttcaatggcgcttattttatcccttcttggttgtacacaaaatcacaaaactggaaaagtgaaagaatatgcaacgtatcaggaagtaactttgagtctatattcaacaaaattaatgaatagccaagtttggagtcatagtatcatggctaaagatcaaacaaaaatgcgcatcaaggaagaagtcgcagcttattatacattaaatgggagtggtcaagaatatcggcaatatatcttaaatcaattaaagagtgaatctcccgaggttgatctttatatcttacaaaatgaagacgttatagaatatcaaagggcaggacttctaccacgtattcgtgatttcactcattcaatttctttatctgaatatgcttataggcaagtcactgatggaaatgattttttttgtatacctttattgatgactggttatggattttattggaatcttgatttactagaacaatatggattatctgttcctaaacaaaaagatgaatttctggcggtttgtgaaactctaaagaaaaatggaattacaccttatgttgcccataaagactatgctttggttgttcctgcattagttattggtttaagtgaaatttatgaatcatctgataaagaagcattacttcatgatctagcgactggaaaaaccaaaatcagtgattatatgaaaaagggatttgaatttgttcaattattaatagataaaggatatattgatgtcaatgatgcaaagcatcgtaatgccaaagatgctggaatagattttgttaatggaaaaggcgcatgtctatgtcattgtctacaattagatatgtctaaagcttcatttgaatatcagatgacaggtattcctttatcagaaaaaggcgcaatggcagttgttggaacagctcgtcatttaacttataatacacatagtccaaaagctgaatatgctaaagaatttattgatgaagtttctaaaaaagaaaatttagatacaattgctaaagaattacacgcgattagtgttacacaaaatcctgattatggttatttagaagaacaacttgatgattttatatcaacgatgcgaggaaaacatcaaattccagttcgtgataccaagctgccttttgaaacttggggttcaacccgtgatttaattcaagatatgcttagtggaaaaacattagaaaatgtaatgaaagaatatgatcaattgcaatatgatcaaattaaaggagaataaaagaatgttatgaagaagaaagtatctcatcatcaattaaaatatttctttattggtagttcttttattatttttctagttatttttatcattacaaatgttttttctagacaaattactgaaatgattgaaaacagtgagtataatcaattagctgatacaacagatatgatacgtcgacaaattgataataaaatcattgaagatctttcatttatggaatcttttagtcaaaaagttattcaaaaaaaacatgatgcacaatcattagatatctttaatacaatgcgacaatttcatgcgacatattatgttgataaaagtggtcaaggaattgataacaaaaatcagaattttgatatcagtgaattacatattgaagaatttgctttatccaagcaaaaaagtgggatatcagattgttttcgtgaagaagatggaaatatgtatgtagtttatcaaatgcctcttattcaagataaaaagttggtaggagcgatttattgtgaatgcaatattcaaaagttttataaagaaacactgtttgcttttcatgatggtgatggacgagcttatgttgttgataatcgcgatgggagttggattttaaaagggccagcttcgcctttaatcaatttatcagaaagttcaatttatcaaacattattaaatgcagacaattctcaaactgtggttaaagatttagctaatgatttcaaagctggtcaaaaagctatctattcagtcaatggtaatcaacaatctttatatctaggcgctaccaagtcattaaatcatccccattggcagtttgtaacaattatttcttcacattctttagaagtcttatctttacaaatttcacattttttatggggaattagaattgcatcaatgcttggaattatcatcttaattctcattatttatagttatactcaaaaacgtgaaaaacaaagaattatggaagttaaagatcaattaaaagaattaattggaaatcaagatcaccaattacaaatgatttttacccatgaatatgattttgttatgaaagttgatctcaatacaatgactttaacttatcatgtttatacaccaacagttcaactttggcaaagttttctttcaccaaagtatgaagaaacttatcaaaactttagagcacgtattttcttagatgatttaaaggcttttgatgaaatttgtgaaccatatcatttaaagaaattagcttccttaaaagaagatgcttatgtggtcagttttagaattaatgaaaatggagaaacattattttttgaatgttatgttatgtttaatttgtttggggaagaaaagattgcttattttatgaataaattaaaatagggaaaggggagataaaatcatgggaagttctcaaaagaaaaatatgataacaaaaaaaccattacgttcttattatttggttttatctcttgttgcagttattgttattgtattagcttcttattttgttgttcatattcgccaagtgacctatcaacaaggagaacattatttgttagaaatttcccaaagtattgctgataagatgaatttaaataccaatataagtttatctgaattaagaattacagcatcaaattatattgaaagaaaagaagctcatgggagcgttggagatttcttacaaaagcgtgctgaagctttagatttttcgtttttatcattcatggatatgaacggaaaatgtacaaatgataaaggtcaggcttttaatttttcaaatgatgatatgattatggaagtcttagaaggtaaagaaattattactgatagtataggattaaagtcttataatcaagatggtttgatttatggggtacctgtttatcaaaataatcaaattattggaggaatcatagctttagaaagtaaagaatggattaatagtttattggctgaaaattattttgataagcaggcttatttccatgttattgaaaatgatggaacatttgtaatgaagtctaataatgataatgatttaatgattggacataactttttctatgagctttctaatcaaagtacattaagtcaaaaacaatttcaaaatatccatgatgcaattggaaaaggacaaagtggctcttttgtttttcatcagaaaaataataaacaaaatactcaacttgtttattatgttcctttattaaaagatatgtctttaatctttatgattgatcaacatgtagcgttaggtccatttcaagatttagcattttattcaaccattattttacttacaattattattttattaacaggagttttattgctggtatttattaattatcgtaaaaataatacacagctctatgaaacagcctatgttgatactgttactcaagggtataatcaaacacgttttcgtattgaagctggacagctcatttcaacccatccacctttaacttatacttttttaattcttgatataagtcgttttaaattaattaatgatgcttttggttatcagggtgggaatcgtttattgaaatatattcatgatgtgattaaagcaaaattaaaagatgatgaaatgatttgtcgtattgctgctgatcaatttgttattttattacatcgtcatgatgaaagttcaattgttgaattattagattcatcaatttcacaaatgaataattttaataaaaaattacaggaaaaatattttttaacctttacgattggtgcttacatgattgatgatccaaatctttcagttgtctttattcaagatcgtgccaatgtcgcaagaaaaagtaaagcttgttcaaaaaatcatcctttctatcgtttgactttctttgctcaagctgaacatcagcgcatgttaaaagaaaaagacatggaaaatcgaatggaagaagctttaactaatcgtgagtttgttgtttacttccaaccaaagattgaactcaagagcaatcgctatgtaggtggtgaagccctcgttcgttggttaaatccacaaaaaggcttaataccaccagatgagtttatccctttctttgaagaaaatggatttattattaaattagatttatatgtctttgaatgtgtatgtcagcatataagaatttggctggatgcaaaattaacgccagttcctatttcagtcaatctatcccgtgctcatttgaataatccacattttttagataattatattttgattcaacaaaaatataatgtgccacctcatcttattgaaatagaaattacggaatcattattatcagaaaatttagaaactgtaatttgggctattgataaaattcataaagctggatttacttgttcattagatgattttggaagtggttattcatcactgaatatgttatcaagtattagtgttgatgttattaaattagatcgggcatttttcaagagtttggatatggaaaatgatcgagaacgtgcgattattgaaaccatcattgatatgacaaaacgcttacagatgcgtactgtttctgaaggggtagagagtggattacagttagaatttttaaaaacaattgattgtgatatggtgcaaggttatgttgtttcaaaacctgtaccagtgaatgaatttgaaaaaatgatttttaaagagaggggatagaaatgagttattatgttgttgttgaatcttcacaggtcttgtttctattgcctttaacaattgttgatatgattgttgatcgcgactctttagaagatcaaaaagtgattgatttatcaagtctttttcataacgaacaaacccaaggaagctatgccatattaatcaagaatcagcagctagctttagtcgttgataaggttgaggatgttttagaagtatcacaagaaaaaatcattccattcaaccatattgtcttaaagaaaaagataccatttgtccaaggtgtgatttctcatcatgaacaattatgttttgttttattagaaagtgttttagatgttttgattaaaaataaagatggatagagagggataacatgattcgaattgatgagaaatcttttcaaagtattgtggaatatatgaaacaatcttatggattagatttatcaaagaaaaaagtgttgatagaatgtcggctgacaaaggtcttacaaaatttgaacatacctagttttgaagcctatgttaaaatgcttaatcaagatcatagtggtcaattgattgaacaaatggtagatatattaacaacacattatacgtattttttaagggaaaacgagcattttcaattattaaagaacaatcttttaccagaatttgtggaaaagaaaaagaatgcaatttataaaatatggtgtgccggttgttcaacaggcgaagaagcttactgtttagctatggtgatggaagattataagaaacagacaggattatctttagattaccaaatcctagcaactgatatatcggataatgttttagatattgcaagaaatggtgagtattccattaaacaattggcaacaattgaaccttattggcaattacaatattgccatgttaaaaataacacaacattttttatagatgatgatattagaaaacatattacttttgataaacataatttaatggaaccattaaaaattaatcgtcagtttgatttaatattatgtcgaaatgtaatgatttattttcataaggatatgcgttatcaaattgtggaatctttagaaaatcatttatataaagatggttatttaatgattggacatgctgaaatgctttctgtgaaggaaactcaattaactacagtttttccttcagtatataaaaaggagatcaaataaaaatgaaaaagattatgattgtagatgattcaaagtttatgcgtacgatgatcaaaaatattctccaaaatgaagaatatgtattttgtgaagcaaatgatggtattgaagctattgcgatgtatccaaatgaaaaacctgatgttgttttgttagatattacaatgccacatatgtcagggatagaggttttgaaaaaattaaaagaaattgatgcagaagttaaaatcgttatgtgttcagcagttggacaggaaagtattattcgtgaagcggttattgaaggagctattgattttattgtgaaaccatttaaagaagatgttttaaagagaacagtgtgtgccattgtatatgctgataagggggtataggtatgagaaagtattttgataatatgaaaatcggaaggaaattgatggctgtctttgtggggattatctttttatacagtttaacagtaggggttgctatttttaatatttatgggttatctgatcgtatgtctgatttatatgcggggcctttttctaatgttgaagattcttttcaaattagtatgaatgttcaaattgtaggaagaaatttgattactttatcaagtggtgaaaaaacgagtaatgttgataaagagattgagaatattaaaacaatagttaagagtgttgatgaaagttttgaacatttgagtaccggttatgtcacaagtcctgaaaaagttaagcaatgcatgcatgaatttgaaaatctaaagacacctcgtgataaagtcattcaattgttagaagatggtaatcaagaagctgcttatcaacaatatacagataaatatgaacctcaggccaaaattgttagagaccttttatcagaaattgttgatgattgtttaactgatgctcaagaaaagatggcatcaagccaagatttaagtcagcaaattgttatcattttagctgtattatcagtcgtttgtattataactacaattgcattatggttgattatcactaagagtattgttgatccaatccaacaaattaaagttacagcaaatgagattgctaatgggaatttaaatgaaacattaacttatcattctgaaaatgaattaggtgagttagcggatgatatgcgttcaacagttgtaacattaaaagaatatttaaatgaaattcaaagtgttttaaaagctattggtaaaggacaattaaattatcagccaacgattcaatttaaaggtgaatttattcaattaaatgtggctatggaagaaatctctatgttattaagagatgctatgcaacaaattaatagttcagcagaacaagtgacaagtggagctgaacaagtttcaaatggcgcacaaattttagcacaaggtgcttcggaacaagctggttcaatcgaagaacttgctgttagtattaatgaaattgctgaatctgttcaagccaatgctcaaaatgctgttgaatctcgtgagatttcaacatttgtaggggaacaagttgtttcaagtaatgatcaaatgaaacaactattagaatcaatgaaacacttaaaacaaaattctggtgaaatcaatacaattgttaaagaaattgaagaaattgcttttcaaacaaatatcttagcccttaatgcttcagtagaagcagctagagctggtgaagcaggcaaagggttctcagttgttgctagtgaaattagacgattggcaacaaagacaagcaatgcttctaagttaacatctaatttaattgaaaaaaataatgaagcggttgaagaaggaatgggtgctgttgataagactgctgaaagtttaaaagtttctgttgaaaatgtcttacaaatgacagaaaagacaaatcttatgtcagaactttccttacaacaaaaagatgcgattgtccaaattagaaagagtgttgaattaatttctgaaattgttcaaggaaactcagcaacttctgaagaaagtgctgctgccagtgaagaattatctgctcaagctcaaattttaaagagtcttgttgaaaaatttgagatatagtggtgagtgatatggaagaaaattttcaaaataacgaacttattaaagattttttacaagagttagggaatattggaacaggtaatgcaatcactgctttatcacagtttttaaatgcttcatttcagctggaattatcaaccgttcattttatgcattatcagcaagtctatcattttcttggcaaggttgatgccttgcatgttggggtctttgttgaagcaaggggtgaaatttctggattattcttgtttttgattgatcaattattaactgaaaaaattattcagacattgttaggacaagatgctgattttaacaatttaaatgaacttgaagaatcattattatgcgaaatgggaaatattgtttgtaatgcgtacgccacagctatgaatggtttactcaataaaaacattcaatgtctcgttcctcaactatgtgttgatatggctggagctatcttaaatgttccaatctcacattttgcttttgatactgatgatatattaatgattgaaacaatttttaaactaggtgaagaaaattacaagagtcatatcttattccttcctgattatgatttccttcaaaacattcctagatttcttgaataactttcattatgacaaagattattgttggcattggggaaggaaaaattgccacatatcaagacatactcgtttcttatgcattgggatcgtgtattggtgtttgtttgtatgatgaagctaggcaaattgctggtatggctcatattgttctgtcacaccatcctagtggagaggtaaggaaaaaatataaatatgccgatattggtgttgtaacgttgttagaagaaatgattcacgctggggcaagaagaagatatattgtggctaaagtcgttggtggagctgaaatgtttccatcagtgaatcagcaatggcaaattggaaaacaaaatattcaaacggtttttaatatattaatgcaagaaagaatacgcgttattgcaaaagatgttggtaaaaattatggaagaacagttactttttatgcgtttgatggtcgtgtagaagtgcattctttaagaaatgataaaatcatataaaaggtggtgtgcatgtgataaacaaacaaaaaatattgatagtagatgatagtttaatgatttgtcaaagagtcaagtctgttttaagtgttctaccagccacgatttatgatgttcataccggtaaagatgctttagacatgattgtcaagattcatcctgatttgattatattggatattattttacctgatattgaaggttttgatttgatttataaaattaaagaaattgatgaaagtcatgccaatatcgtctttttaaccgcaagagatcaaaatttagatgtcattaaggggttatcatcaggcgcttacgattacatcaaaaaaccatttgtcgatgaagaatttttaacccgtattcaaaaccaattactcatcaaaaaacaacgcgatgaactctgtgctcaaaatgagattttaaaaagtaatatggaaaaattgaattatattgcttatcgtgatagtttaacaggattatataatcgtcgttttgttactgagaatttacctaaagaattagcagaaaaagaaaatgaagcaacaaaccattattttgttttgacagatattgataactttaaaattattaatgatacatttggtcatgatgccggagacaaggttttaatttgttttgcagaaatattaaattcttttaaagtgaaacatcgtgctattcgttggggtggggaggaattcttaattattttatttaatttaacattacaacaggcgaaacaaattgttgaagaaattcgagaagaaatagaaaactttgaatttattcataaacaaaatacattccattgtacaatgacttttggtttatatccttataatccagcattagaaattgatgaaaatgtccattgtgctgatttagctctttatcaaggaaaaagtcatggtaaaaactgttgtgtttggtatcatgatgaaaaataaggataaacaatatgggattctttgataaagaaacaaagggaatgttagaagtttatatgattgaaacaagccagttgattgaacaattaaatgttatattattaaatagtgaagaaaatcaatgtctaagtctagaagatattcaaaatatttttagaattatgcatacaatgaaaagctcatcagcaatgatgggattagaaggattatcacaattaacccataaaatggaggatattttctcggtttatcgtgattatggacaggatatccaaatagatgcagcagatttatttaatttattatttgatgtctttgattttattgaaaaagaattaggccttatgaatgatgacaattatatgccagtttcttgtgaagcattaattgaaaaggccaaacaatatcatcaacaattattaaataaacaaaatgttgcgattaaacaagaaacttttgatgttgaaaattactttaaaggtgacgggaaaattgttaagattacatttgaaaaagaatgtcgaatggaaaatgtacgtgcttttatgctagtccatcaaattgaaaagaaatgtcaatctattcaaagctatcctgctgatttagatgatagtcaaaatgctgaaatcattcaaaaagaaggcttttatctttgtataacaacaagtgaatttgatgaagtttttaaaacattagaaaatggtttatttgtatctaaatgtgaagaaattacacgtcaaagtaaaaatgtcaaaaatcaaacaaccttaaaaacatctcaaattcaattaaaaaaactagatactctagaaaatatttctaatgaaataatgatgaatgttcaatatgttaaagatcacttaaaagaaatgggagtagaagattttgatgacagtactctctatcatctagaacaattgtcaaagcagttagaagaaaccattattcaaatgcgtcttgttcccatcaaacaaattgttccaaagttaaaaagaacacttcgtgatatttgtcaatcacaaaataaagatgtagactttattattcattgtggtgagattgaagcagatcaaaagattgtagaacatttaagtgaagctttaattcatattttacgtaatgctgttgatcatgggatagaagatactgcaaaacgtttagaaatcaataaaagtgaaaaaggtcaaattgtttttgatgtagaaatacggcgtggagaactttatatatctattagtgatgatggtaaaggaattgatgttcaaaagatttataaaatagctagtgaattatctttaacagataaaccaattgaggactatactcattttgaactcttgaattttattttaacaccaggttttacaaccaataaagaagttactcaatattcaggacgtggtgttggtttagatgttgtggcacatattttagaagaaattggtggtcatatctatattgaaagtgaactgaataagggctctacttttatcttaacattaccattatccttaacaacaattgattcaacttgctttatattaggagaatatcattgttctattccttcaaaatatgtaacttattttcaaaatgcccaacttcaacaagttcaagaaattaatgggaaaaaatatattgcattaaatgaagaattgattccatttttagatctgtattcttattatgaagttgaaaaacctgatttgaagcaagctctccttatttattttaaaactgcaacgcaacaaggctgcttactggttgatcaagtcgaatcaaatcaacgtttagtaatgaaacgtttaccagttttactaggaggagcttatcgtaatttaagtggaattagtgggattagtttattgagtaaggcaaatatttgtttgaatttggatgtagagatattgattgaaaaatggaaggcagggaaattataatggatacattggaaaatgttttatgtttacaaggacaacaaaagaattatttagtgaaattaagtgatatggttgaaatatgtacacatgtttccatttcaaagattccatgtctaccgccttattatttaggaatctttcattataaagggaatattttacccgtcttacaattagatgaaaatgtcttttcattaactgatacaacaatcttagttgttaaaaatgaagattgttattttgggattcaaattggtcaagaaccagtattagaaaatatacaaaatatgacttttacaacaaataaacaagaatttttatcagatatttggtatattcaaagtctttatcaatatgaaaataaaatttattattttatagatattgaaaaaacaatccaatttttaacaagtgaagaaattatttaaaaaacgtgagaatctcacgtttttatgctttacaaaagacatctttttcgataatttttactacatcttctaaaatcatttgatcatttaaggtaaaacgattataagaaggagaatcaatatccaatactccaatgacttcatcatcaacaataattggaatgacaatctcacttaaactttcagcatcacaggcaatatgaccaacaaattgatggacatccaatacgcgaattgtttctttccttaaagctgcattaccacagacaccttgtccaaaaggaatgcgaatacaagcaacttttccttgaaaaggacctaagactaattcttttttagggttatctttttccactaaataaaaaccaacccagttgatatcatcaaagttttgatttaaaaaagctgatatatttgccagattagcaattatattaggttcatcttgaataagaagatggagttgttcgaaaaataaatgtttatccattgctttcacctcttttttagtataacatacttttatggggtgatagaaatggaaaataaaaaatttgcaaactatgcgatgaatgaaaatcatccagattatccacttgcgattgcgcgagttgaaacactttatcaacgtcgtcatgatttgcgtagtgaatttggtcgtgattatacaagaattatattttcacaagcttatcgacgtttaaaacataaaacacaagtcttttttgcggttgatgatgaccatgtttgtacgcgtagtgaacatgtgaatcttgttgaatcggtatctcatacgattgcatgtgaacttggattaaatacagagttaaccaaagcaattgcggtaggtcatgatttagggcatgcaccttttggacatggtggagagacaattttaactgagattgctaaggaacatcaattagagcgtttttggcatgaaagaaatagtttacattttgttgatgatattgaattactagaagataataatcattatcaacataatttaaatttaacatatgccattcgtgatggaattatagctcattgtggagaaatgaatcaaaaatatattcaaaaaagaaatgaatatattgatttaaaagactatcaatatgctggggaatacaatccttggacctatgaaggatgtgttgttaaaatctcagataagattgcttatttagcaagagatattgaagatgctttacgactccatgttttacaagaagaaaaggtcaatgaattaaaagaaactttgaatcagatgggagaatatcaatttcaggctattaataatggctcgattgtgaattattttattcatgatgttattgtgaattcatcagttgaaaaaggcattggtttatctgatgaagcatttaaaaaaatgcaagccattatgaaatttaattatgaaaatatttatttaattaaaagagttcaaattcacgaaaaatacgtttctttaattttacactctttatttgatttcctatatgattatggtaaagaagatttgatttttgctttatatcgtgatcagaaccagtatccaaaattaattagccattatattacttggcttgataaatatgcttatatcgaaaattatccaagaaaaaaagaatacacaaacaaaatcgtttatgattttgtccatgattctcaagctttagaaaaaagtattttagattatttagcaggtatgagtgacgtatttttaattcaagtttttaatgaattaattacattttaatgaaaatgctttttacctgttatatgaataatttctaattctaatattttcgtattttcaattgcttgtacagttaaatccttggtaaaatcaggggtaaatctttttaagaaagcttctaataaagctttcttattttttttgacttcttttaatattccataaacaacgacactgttatgattatttgtaaatgcttcctgatgaatacctaaatcttctaccacatgataacaagccaattgattcaatccttttaatttatatccttgttgtccacaatgaaaataaatatgttgatccacaacaaaatgatttaaactaacacaatatggaatatcattagtaatagctagactaccataattcatattatttaaaatagtcatactttcttgataagttaataacttacgtggttttcgataaacgggtataggataaatgagataatcatgattaaagaaatcttgataatttgtatagagaatattgtttttttcaatggggttttcttgatcttttaaaacaacaatataatcatataaacaattttttaaatacttttttggataaatattgattaatgtttgagagtattggttaattaaatcttctttcatttgttttcgcgctcctttttctttattttaaagcaaataagggtacaagtctattttaatttatgttaaaatagaaaacaatgaagtgaggtgttattatgccaataaaaataccagataatttaccggcagcgaaaatattaaaagatgaaaatatatttatcatgaatgaaacacgtgcaacaacgcaaaagattagacctttaaaattattgattttaaatatcatgccaacaaaaatagttacagaaacacaattattaagattgttatcaaatacaccattacaaacagaagtagattggattcatatggctagtcatgattcaaaaaatgtttctaaagagcatttattagctttttataagacttttgatgatattaaagataacaaatatgatggtttgattattactggggcacctgtagaaaaactagaatttgaagaagttgattattgggatgaattaacgcaattgttagaatggtcaaaaacgcatgtttttagtagtttctttatttgttgggctgcacaagcaagtttacattatttttatgggatatcgaaacatttattaccacataaattaacaggagtctatcttcatcatacaaatgttgataaaatgaagcgcaagatattacgtggttttgattatcagttttatgcaccacattcacgctatacaacagtcttaaaagaagaaatagaacaagttaaagatttagatattttagctgaatcaaaagaagcaggggtgtatattgttgcttctaaagatggttcgagattctttattactggacatcctgaatatgatccagatactttagacaaagaatatcgtagagatttagcaaatcctgatattgtgagtgaaatgcctaagaattattatttaaatgatgatattgatagtgaaattcaagtgaaatggcgttctcatgcttatttgatatttgcgaattggttgaattactatgtttaccaagaaacgccttatgatttagaggagctcaaagaaagataaaaattgagctcttttcttttttttgtgatgaaaatgtgattttttggtaaaagaaatatgatagctatgattgatagtatctattttttgttgtataataataaaaggtatttatactttttgtaaatacttggtaatggaggtgttatgatgcgttatgcaaaaatagttggaatgagttttattgctttatcactttcggtcacttgtttgttaataaatgctgatgctaaggataaagatgaaataagaggaccagaattaacggattcttttacaattataaatgaagatggatcttctaaaattgtttattatgatgaaattgatacagatgattcaaaaatagaggaacttactaaagaatatgatttaattgctgaacatggtaatcaaaaaaaggttgttgaaacttatgattcaaaagaaaaagcacaacaggctcaaatgaaaaaatcaatgtatcgttcttcaacatcatattcaattgaggaaaagaatcggtcaattaaatatggagttgtttatttaaaatcaaatgactataaaggtaatagttatttaacttaccaaaatgtaagtaatccaggatatgatggatacacaacaggttcttttgctaaagacgctgcatatattggcgaatttaatgggaagattcgtgcagtacaagctggtgttataatggattttgataaacgtgatgtaaatgtaattagctatgaggatgctaatatttcttattattatgtgaaagataattatttatatcatcaattctattatggtagtgctggtgattctaataattatcgagtaggttatgcattgaattatttaactaaagggacacattattatagttatgatggacattatttttataaggattatcctacaatgattaaagattatcaaaataatgtgagaactcatgcagtaaattcaacaaatccatattacaattattatcaatttttgtcacaccgctcaacaactgcagtgacttctagtcatttagattttattatcaatgataaaattgataatagtgattcaaaaatgaagaatatgggacaatactatacacaatatcaaaatacatatagtgttaatgctttacttatgctaggtgtttcaggaaatgaaagtaactgggggagaagtaaaatagcaatggagaaaaataatttatttggacatggtgctgttgataataatccttattatggtgctcatggatataagacaccttcagatagtattaaatatcatgctgaacgatttatttctaatggttatttagataatgaagactggcgttataatggaggacatttaggcgataaggcaaatggtgttaatgtacgttatgcctctgatccatattggggagaaaaagctgcaagtgtgaattactattatgatttagataaagattatggtcgttatacaattggaataattaatggagttcagaagtcatacaagctttataaggagccttcttattcatcaactattgttcatacattaggagcaaaaaacgaagtgacaagtccacgtacatataatctaccagttattattttagatactataaaggatagttcaggtaacagatggtataagattcagtcagatactgctttaaattcttcaagaactgatacatcttggagcaatcaatataattttacaagagattatttatatattcctgctacaaatgtaactgttgttaatcaaggaagtgttgttgttccttcatatttaccaggagatgtaaatggagatggtaaagtatcttcattagactacattcaaattaaaaatcatattatgcaagttaaaatcttaaatggtgcttctttattaagagctgatgtaaatggagatggcaaagtgtcttcattagattatattaaggttaagaatcatattatgggtactaataaattattttaatgggggaaaataaatgaaattaaaaaaaatcataaaaactgttttggtttctttgactatagcagtttcattatctttaagtagttttaatgtttttgctgctggatttagcgtttctgcgaataaatccagtgttgctcctggaggtaaatttactgtacgtgtatcggttggtggggcaggacaatttagcgtttcagcatcaaatggatctgtttcaaatagtagtatttgggctgaaggaagtgccagttttactgtaacagcaggtcaatctggtaaaacaactgttacagtaacagctgttgatgtaacagcatctgacgaaagcccagttaatggaagtaagtcagtaactgttagcattaagcagcctactaatggtggtggaagtaatacaacaaataacaatacgacaacaaaacctcaagaagatactcgttcaaaagaaaataatctttcttctctatcagtatcaactggctcattatcacctgcattttcatctgctaaaacaagttataaagttgaattaacaagtgatgtcaaagagattactattagtgctaaaccaaaagactctaaggcgaatgtttctggaactggaaaacatgaattgaaaattggtgaaaataatttttcagttactgttaaagcagaaaatggtgcaaaaaaaacatatacagtgagtgtttatgttactgaaaaaccaacagtttttgttacatatggtgatcaaagtttaggcgttttaaatgatttatctaaaacagatgtgccaaaaggttttgaacctacaaaattagaaattgataaaaaagaagttactgcattaaaaaatgataaattaggattgactttgttgtatttacaagatagtcataataaaaatggtttttatgtttatgaaaataatgaagttactggaaattatcaaacattagatgctaatggaaaaacatatattgttattcctgtaccaaaaaatttaaaaggaactgaaaatttaaaattttcaaaagtaaagattggtgatatggaattagatggctggtcttatgaagataaaaatcatgcaaattatgcgattgtttatttgatgaatgaggcaggagaaaagaatttatattcatacgaaaaaactgaaggaacattacaaaaatatgttgtaagtgaagaaaagaaagtaaataatactttaacttatgttttagctggaacgactgctctctttgctttgtctactttaggtgtatatgtgatgtatatgaattttaaaaagaaatctattgcgacaattaaagattattatgatagaaaaaatcaaggctaataaaccttgattttttaatatattatgaagtagcatttttttaattaaagagtttcatcttcttcaatatgcatcagttcatattctttaagagttaaaatgatatcatcatatatttttttatctaaatagttttgtaaatcatcaatactgacaaattgataatcagtatgttcatgagaaattgtgacatgatcatttgttggaattgttaaaaaaccaatgccaacagtttgataatcaggacgaatagctgtaaatgtataaactggcttaatgattttaatatcaaggtttgtttcttcttttaattctctaattaatgcttcgtgtggtgtttctccatattctaaaccaccaccaggtaattcccaataccccaaaccatcactagaagggcgaattctttttaagataagtattttgtgatgataaacgacaattgctttcacagtaatatgaaatctgatattttccattataattaatcctccatttaatttaatcatagcacttttttataaaaaagtatcgttttattaaaatttttgatataatagtttacggggtgattttatgatcgattttttagaagaagtttataaaagaaaagacgatatcattgctgatattgagaagctttgtcgcataccttcagttttagatgaagcaactgcgaatgaaggacaaccatttggtgtagcatgtaaagaagcattagatgcaatgttggaaattggtgaaagagatggctttgtctgcgaaaatgttgacggatatgctggtcatattgatattggtgatgaagaagctgcttttgggatactaggtcatttggatgtagtgccatgtaataaagaggggtggaatactgatccttatgaagtgacaataaaaaatggaaaactctatggtcgtggagttgcagatgataaaggtcctttaattgcgggatattatgctgctaaaattattcatgaactagatttaccagtgaaaatgaaaacaagaattatttttggatgtaatgaagaaaatggttctaagtgtatgaaatattattttgctaagaaaccttatccagctatgggatttacccctgatgctgagtttccagttgtttatggtgaaaaagctggggtcaattttcaaataactggggaaattgaaagaggtaatattataggaatttattctggtacaagatcaaatattgttccagaagtttgcgaagtttatattgaaggaaattataagcaatataaagattctttccatcaatatttagctacacatcatttaaaaggttctgttgaagaagaaggaaaccatactaaattaactttagttggtaagtctgcgcatgcttcaacacctgaacaaggaattaatgccacaacagcaatgtgtcattatttaatcacagtaagtgaaaataaacttgttcaatttattgatgaatgtttctatcaagatcattatggcggaaagttaggaattgcatatactggtttgatggggcctttaactgtgaatttaggtgttttaaattataaaaatggtcatgtttcaatgattgtagatatgcgagttcctcatgaagtcaatgatgaacaattaacaaaaccaattcaagcacatcttaatgtatatggtttattagaatcacatgagttaggaaaggcattatatattgatccacaaagtgatttggttcaatcattacatagtgcttatgttgaatttactggagatcatacgcatcaaccacaagctattggtggtggaacttatgccaaatcaatgccaaactgtgttgcttttggggtagaatttccaggtactgacaacaaaattcatcaaaacaatgaagaaattgcaattgaagatttattaaaagcgactgcaatttatgcgaaagctatttataatttaataaagaaatagggaaactccctatttctttattgcctaatgaaattattttgtgctataatataaaagcaatatgcggacgtggtggaatggtagacacgccatcttgagggggtggtagacgtatgtctgtgtgagttcaaatctcatcgtccgcaccattttttattaaaatgaaaattatattgatttaatcagaatgaaatgtgattttatgaactgtttttgagtggttcatatataaatttatgattaaagtgacatcagagtggttgtaatattgattatgatcattttttatttagaagatatttgttgaatatttaaaaaaggtgaaatactttaagtttattaaaatttatttttgaaagaatatgcattttgtgtgaaggcattatcatctcaattattgattattttacttttttatgctatacttttaacgaaaataaatggtatccaattaaaacaagatgtaatttggtaaaaagtaattgttgggactatttatataaatgatgcagctgtggtggaactggtagacacgctatcttcaggcggtagtggatttatccatgtgagttcgagtctcatcagctgtaccaaatgaatgcaacattgtgaaacaatgtttttttttggaggaaaatatgaatactgaaattattaaaacaatggctaatgaattagctattagtgaaaaacaaattgaaaatgtattatctttattagaagaaggtgcaactgttccctttattgctcgttatcgtaaagagaaaactggtggattgaatgaagatcaaattcgtgaaatttctaaggtttatgaatatcaggtgaatcttcaacaaagaaaagaagatgttattcgtttaattgatgaaaaaggtttattaacagaagaattaaagaataatattttaaaggcacaaaaattaagtgaagtggaagattattatcgtccatttaaagaaaagaagaaaaccaaagcttctattgctaaggcaaaaggcttagaaccatttgccttaagtatcttaaaattaccaagagaatttcatttagaattagaagctcaaaaatatttgacagaagaagttttaacaattgaagatgctattcaaggagccaaagatattattgctgaacaaatcagtgatgaagcacgttatcgtaaatataccaaagatatgatttataaaactggtttaatgacaacgcatgtgaaaaagaaaaatcctgatgaagatggagtttatcaaatgtattatgaatatcaggaaaaagttcaatatatagcttcacaccgtattttagctattaatcgtgcagaaaaagaaaaagtattaacagttgctattgaaattgatcaagaacgttttatgacatatatttataatggtgttatgcgtaaaagagaatcaacattaagtgaattgattatggaatgtgtaaaagatgcatttaagcgtttgatttttccttcagttgaaagagaagtaagaagtgaattaactgaaaaagcgcaagaacaagctttaaaagtcttttctattaacttagaaaaactcttattacaagcaccacttaaagatcgttatgttttaggtgtggatcctgcatttagaacaggttgtaaactagcagctattgatccaactggtaaagtcttagatattaataaagtttttattactttaccaaaagccgactatagtaaagatgaaaaggttcttttatcaatgattcaaaaatataaaattgaaatcattgcgattggaaatggaacagcaagtcgtgaaacagaaagctttattgctgaatttattaagaaatatcaattgaatgttcaatatgtgattgtttcagaagcaggagcaagtgtttattcagcaagtgggatcgcaaaagaagaattcccaacatatcaagtagaagaaaggtcagcagtttcaattgctcgtcgtttacaagatccattggcagaacttgttaaaattgaacctaaggcaatttctgtaggacaatatcaacatgatatgaatcaaaagaaattaaccgaacaattagacttcgtagtagaaaaagtagtcaatcaagtcggggttaatatcaatactgcttctccatcacttctgcaatatgtttctggtttatcaatgtcattagcaaaaaatattgttaaatatcgtgaagaaaatggaaaatttacatcaagagaacaaattaaaaatgttagtaaacttggtgataagacatatgaattatcagttgggttcttaagaatcttagctggtcaagaaaaatttgatgaaacaagcattcacccagataattatcaagatgcttcacgtttactccaatatcttcatttaactaaagaagatattggaacatcatcagcaaaagaacaaattaaaaaattaaatcgtgaacaagcgcaaattgaattaggtttagacgaatatcttttcaatgatttattagatgcttttgtctcaccacatcgttcaccacgtgatgaatataatgccccaattttaagacaagatgttttaaagattgatgatttaaaagttggtatgaaattacaaggggtcgttagaaatgttgttgattttggagcctttgttgatattggtttaaagaatgatggtttggtccatatctctaaaatggctcatcataaagtacaacatgctttagatgtttgtaatgttggagatattgtggatgtttatgtttatgaaattgatctaaagcgaaaaagagttgctttatcaatgattgaaaatgcttaaggagaatcgttatggaattgatctattatccaaaatgtagtacatgtatgaaagctttaaaacatttagaatcaaagaacttatcatttaaaaaacgtcatattgttgaacaaactccaactgctcaagaatttcaacaatggattgaacaatatggacagggaataaaacctttctttaatacttcaggtcaagtttatcgggcaatgaatcttaaagataaaataaatgatctatcagtagaagaagctagtcagctgctctcatccaatggaatgttagtgaaaagaccattactgattttagatgatcaaattattattggttataaacaagaactctatgagaaattatagagttcttttgtatttcatagggagaataatgcaactgaacgatattcgatagtaaaaaatataagatatgttatactacaaaaagaggggtgggaaaatatgaaacttattattgaagaatctgatgattatcaagaaaatgaaatcctgattaaatgtcaaaatcaaaatgatgaagaaattcaaagaatcatacaaaatatccaatctttacaaacatcacttatttgtaaaaaagaaaaagcttatctacgtatttatttagaaaatattctatatattgaatcaattgatgaaaaaacatttctttatacaatagatgatgtttatgaagcttcacaaaaactctatgaattagaacaaaatcttcaatcacaaggatttttaagaattagtaaatcatgtattttaaatcttgaatatttacaacatgtacgagctttatttaatggaaagtatgaagcaacattaactaacaatgaaaaattaactattaatagaagttatgtagcagcttttaagaaagcttttggcttataggagggttttatgaaaatattaaaatatattcttttagtgacatgcttttcttttacattggttactctttgcaatgcaggtttgataggtttatcaatgagtcatctctcgtttacaccaatctatatttttgaaatctttattgtctgtttgattattgctattttcattgtcattggagcacaatggaagatagtgagaaagtattcatttctttataattattttgttgttttgttggttgctttatttggggtatggataagttttgataatatttattggatgaatttgcttgttgaagttatttttttaacaattatttatttaggcgtttgtggcatgatttatgtgattgattataaagatgctaagacaattaataaaatcattgaagaacgaaagaaaagaaagtaaaagttgctggtttgcaacttgaaggtggtagtaggaaacttgatggaaggatatgataaagatgaggaggaagtcttatgaaaaatgtaattgaaattaatcatttaacgaaatgttatggggatgtaaaagctttagatgattttcatttagaagtgaaagaaggagaaatattaggtttgttagggcctaatggaagtgggaaatcaacgtgtattcatacgattttatcgttgttgtcatttgatgaaggggatattcgtatttttaatcaagaaatgtcaccctcggcttattcgattaaagcaaagattggggtggtttttcaagatgttgcagtttttgatgaacttaatgttgtagaaaatattgattatttttgtgggttatatatcaaagataaaaaaattagacaacaatatatcaaagaagcaattgaattggtaggattagaggaatttaaaaagttcaagccaaaacaattaagtgggggtttgttaagacgattaaatattgcttgtgggattgctcataagccatctttaatatttttagatgaacctactgttgcagttgatccccaaagtcgtaatcatatcttagaaggtattaaaaaattaaatgagcagggggcaacgattgtttatacaacacattatatggaagaagttgaacagctttgtcatgaaatagtcattatggataagggacgtgtcattgctagagggacgaatgatgaattgaaaaataagataagtctaggtgaaaaaattaccatcgtcttaaatcaaaaagaggaagaactcatttcacttttaaaagcagatcaacaggtgataagtattcaagaagaaaatcttactttgcatattgcttatcaaggaaaaggaaatcatttagctgatttgatagatgttttaagggaaagcaacattcaatatcagactttgtttagtgaaagaccaactttaaatgatgtctttttagaattgacaggaaagcagttaagagattagtatgcagatttttaagtatcagttaaaacttctcgttagagatcgctccatgcttttttggacaattttatttcccttaattttagcaacattttttaatttagcttttgctaaattaagtcgtacagaaagttttgaagtcagtcatgttgcgattgttgaagaaaagcttaatcttagcttcaaaactgtattgaatgctttatcccaaggggatgagcctattttatcagtacaatatacatctattcaacaggctaaagaccttttagaaaataatgatattgatggttatattcttgtaaatgatgaacttaagttaatcattcgggataatggaatttcacagaccattcttcaaagtgttatggataattaccaacataaagaaaaaactatgcagtcaatttcattacttaaaccacaagctattaaagatattgttgttcaacaaaatcaagattattttaaaagtcaaaagctttcttcattagatgtaacagtgatttatttttatactttgattggaatgacttgcttatatggtggtttttggggattaaaaataaccaatttcacagaagctaatttatcacgtcaggcaacacgtttacaaattgctcctacatcaaaattaaaagcaagtttaacaggtgatttggcagcttttatttgtcaatatattgcgattgtgattctcttactgtatttgtattttggcttagggataggctttggaaaacaaattggatatattttattgatgagtgcaattggtagttatgtaggaattgttgtcggtcatttgattggacgtttatttcattgtcaagaaaataccaaaacaacaatattaagttcattttcattattttgttctttcttatcaggaatgatggttgttgatttaaaatatcttattcaagaatatgttcctatcttagcttatatcaatccagtcaatttaataactgatggtttatatgctttatattattatccaacgtatgaacgctttttcttgaatctaacaatcctttgcttcattggctttattttaacggttttcaatattcttattgcaaggaggaaagtttatgacagtctttaaaaactattttaaaattgcaaaatctttccttccaacaattttaatttatacacttatttttatgagcattacaacaattacttcaaccagtggtgctaaccaacaagactatcaggcaagtcgcagtaaagtagctttcattaatcatgattgctcatcacctttgttagacggttttcaaaattatcttgaagatcatgctgatttcgtcaaattaaacgatacacaagatgaacttttagatgcactgttttttagaaaagttgattttattatgattgtcccagcacattttacagtagattttttaaaaggcaaagatgttcatattgaaaccatggatgttccagattcttattcatccatctatgctaaaaacctatttaacgaatttttcaatacagcccatttatatttacaagccgatattgatgaaaaagttatgttacaacagattgaaagtaatttacaaagtcatgttgatgtagaactgacaaatcaatcctctaatcatcaattatcccaggtaaaacaattttacaattttgcaaattacacattactagccattatcatttcagtcatgtcaatgattatgctttcctttcataatgaaaacattcaattacgtcatttatcctcagctttatcttatcgacaaatcaatattcaattacttttaggcaatattgtttttaccctagcaatttggctattatatgtcatgattagttttatactttatcatcaaacaatgttttcaatcactggcttactctttatggttaattctctaatcttttcaatctttattctcatttttgctttctttattacaaccttaacaaataatcgggaaatcgttgggatggtttctacagtctttagtttagggagcagttttattgcaggcgcttttgttcctcaagaattattatcgtcttttgttttatcaatagctcaattcacaccatcttattggtttatttcaaataataatttgattgctcaaataagtgaatacaatttatcttcattacaaccaatattcttacaaatgggcgttattctagtttttgctttcttattttatattttattacaaattgtttcttatctgaaattaaaacgttaaagttcaagagttatcttttgaactttttgattatgtaaataaatatttccaatttgttttttttcggttatacttaagataagatgtaaaggagttggaaagatgaaggatatagaaaacgttatcggggaaatcaaaaaagcagtcattggaaaggatgaagtgattgaaaaaataatgatgactttattagcgagaggtcatgttttattagaggatattcctggagttgggaaaacaaatttagctttggctttatctaaaagtatgagcttggattatcatcgtattcaattgacaacggatgtgctacctagcgatattgttggttttacaatgtataatccacaaaaaaattgctttgaatacaaggaaggtattgctttttgtcatttattattggctgatgaaatcaatcgtacttcaagtaaaacccaagctgctttattagagctaatggaagaaggaagaatgagtgttgatggcacaacttatgaattacctcaacctttttttgtcatagcgacccaaaacccatttggttcagcaggaacccaattgttaccagattcacaattagatcgttttatggttcgtttgagtttaggttatcctagcattgttgatgaagttgaaattatgaaaacccgtcaattaaataatccattagaaagtattgaagcaatcttatcaccagaaacaatgtgtgaatatcaaaaacaagtggatcaggtttttatgagtgatgaaatttattattatattgtagcaattgttgatgcttctcgtcatcatgaattggttgaacaaggagcaagtcctcgtggttctttagctttaatgaaattagctaaggcatgtgcttttatgcatggtagagattatgtgattcctggtgatgttaaagaggtggcaccaatgacattggcgcatcgtttgattttaaattatgatgccaaaatgaaagaaatgaatgctttgtcaattgttgaggatattcttttaaagcttaaagaaccaggaatacaatgatgtataagggattagttcgatacatattgattgttgtttttctttatgttttatggagtattgttttaggttatttttcatttcttttgtttattttagcgttattgttatttgtgttttcatggcttgtcagtttaacaagtatgaaacatacaactgtatctattgatattgaacatcatattttagaacgtcaacaatcattttatttatcttttttaagacaagatcaaagtcgttttcgttgtggtcagattattattgattatcatattgaagattgtttaggagaaagtgtttatcaatcacgattaactttatatgatgacatttctatggatcgaattgattttaaacatagtggctgttattgggtgatgattgataaaatctattgttttgatattttacaatgcttatttaagaaaaatatttgttcatgtcatgaacaaatctatgtttttcctaagatgatccctttgcagattaatttatctcaaattgctagttttcatcaggaatcacaagaatactcaccttatcataaaggggatgattattctgaattatttgatttacgtagttatcatgaaggggattctttgaaacatattcattggaaagcatcattaaagaaaaatgaattgtttgttaaagaaggaagtcaaccgataattaaaaaacttcttttaactgttgatttaaatcaaaatgcttcctacaatgataaaagtttagatacattttattcattatgtttaaatttattacatagacaaacaccatttgaaatcatttgtccacaaacttatcatcagccagcaaaagaattaataagcaatgtttctcatcttcaaacatgtttaaaaaggattcttaaaacaccaaacttttcttatcaagatgtttatcaaaaaatgaatgggatgagtctttatgtggttaagggtgataagattgaggtgattgagcaatgagattattaaaagaaaaattaaatattggttttgattttttagctttgatattaggaatcataggtcttgttggtggattatttcatgcgctttattttccttatcgggttataggtattcttttgttttgtatttatggttgcggcttactttatttttctcaaaataataatattcattatcgaagattaatgagtattgtatgtattagtggggttgtttttatattcattttattttctaatgaaagtcaaaatattttaagattacttaaagatgttattaggtatgattattttttgaaatttgatgaattatttaagcaaggaaagattgataatgtcttattatcacttgcttttatgtctattattggcattcctttgactcatttgatagtttcatttttttgtcaaataagaggaaagattttgaaaatgattttctttattataagttttgtatttccaattcttatccatcatcaattagcaatctatacaagttattgttttttagtgtttttgatttatatttttatatttcattattgtttaaaatatcaaaaacaagtcttttctttaaaatgccttgttttatctttagtgacaatctttttagttggttctcattatttcttagagcctaatccaatttttaaacagggaacatcaaccgttttaacgaatattactaattggtttgatcatccttatttagatgatgtctttggtaatcataatatcacaggtatgagttcttcaattagtggtagtctaccaaataatgatattactttagataaaagtattgccttaacagttgaatcaaaggcctcctttacgggttatttacgtgggtattctcttgctcattatcaaaataataaatggcatgctgttaatgagaattatgatgattttgattctggaagtcttgtaggaaaagctttagatgaatatcatgtgatttcttcacttgaagtttcaattgaaacaatgaaaccgaccagatatcaatttgtcccttatttctcttataaaacattagatatgaaagatgactcttattatcctagtgataatcaaaagatatctatagccaatatcgatattgaaaattgggatatttatgatggcttaaatagtcctatagttttacaaaaatacaatgaatatgtcaaagatgaatatttagatgttccagataatttgaaagatgaattaactcatttgattgaagaaaaaacttcaacaatgggattgaatattaatgaattacaaaattattatacgcctattcaaaaagcaaatattattaaaaaaattttagataaacaagctgtttatagcttgaaaaccggaaaattaccaaataataaagattttattgaatattttctttttgaaaataaaaagggaagctgtacccactttgcttcttcaggagcaatgttgttaagatgtttggatgtgccaacgcgttatgtgagtgggtatattattaaatcgtcagattttgaaaatgggaaagcagaagtttcgaatacgcgttcacatgcttggattgaaatatatgttgaagatttaggttggattcctgttgaaatgacaccagcttcttcaattcgttcacaaggaacaatccttgataatctggtggaaaataatcagccagctacggataaccaaccaactcaggatcctcaaaccaatcaaccgacaaatcaagatcaaaatactgatatacaagatagccaacaagttgtagaaaaagaaaattcattgattgaatttttcaatgaaaatagtcaaatcatctatactattggaattgtagtcattttacttgctggttatcgattaataacaacacatctattgaaactgagattaaaacgtcgtcataacaatgaaaagattatcctttattacaaacaaatgaagaagtttaaacattcatatgtgaaagtgtatgatgatgcactctctttagcaaataaagcaaaattctcacaacatcaaatagatgatttagaagttgaaaaaatggcagaactctatcaaagatatgtaaaagaaacatatcaaagtttaccattctatttaaaattcttatataaatatatttatgggtatatttaagaatcaattgtttttataactctttaaaattcgattatcagatttttaaggcatgagttatattagtaataaagctaatttaaaaaggaaaaatcaattcgtgatgaaaagatttttcctttttgttattgaagatattaaaagctgtaataagttactcttgaaagttaactcattacagcttttcttagtcattctttaaatgattgatattggcatattgaggaataccattttcataagaaattgtgacttcaccttgaataagtgggaataaataatcataaagttcttgagtgatgtcattatgtgcttcattaatccaatgaattggaatacgttgttcaagattagcaattgaagatacatctttgctatcacagctaatttcataaggataattgttaacacggttaaagaccatcataactcctgttttaccggccattgatgtttcaactgcacaacgtccaatttcaaatgattcatctaagtcaacttgtgaagcaatatgcatagcacatctttgtaaaacatttaattcaatacttcttactttacatttaaattcttgataaaccattgtttctaagactttccctgtccctgagtgaagaatatgtccaaaggcatcacgttttgcatatttagaatctgagtcaaggaattctccgttttcatctctgattccttcacttacagcaataatgacacttctttttttcttaaatacttcacggatatcatttaagaagctttctttgttgaaaggaacttctggtaaataaattaaatcaggggcttcgttatattgagttcttgcaagggcactagcggctgttaaccaaccagcatttcttcccatgatttcaacaattgtaacggcatttaatttatagatagaactatcataggcgatttccaacattgatgttgcaacatattttgctgcagaaccaaatcctggcgtatggtcagttcccattaagtcattatcaattgttttaggaattccaataaaacgaataggggattgaattgttgcagcataggttgataatttagcaacagtatccatagaatcatttcccccaatataataaaagtcagtgatttctaattcttcaaaagtacggaataatgattcgtagctttgtggatcttcttgatatgtaggtaatttataacgacaagatcctaaatacatcgcaggtgaatgtttgagatgattaatgttttcttcagttttaaagatatctaataaatccatatatttatgttcaataagacctttaataccattaatcattccatagacatgttcaaattcttgagtttctatacacttagcaataatcccggctaatgaggcattaatagctgttgtaggaccaccagattgtccaataaaacaatttctttttttcatgattcgactccttcttttctattccaacatattctatcatcttttgcagcataaaaaaagatgaatttttttgaatttgcacgattctatacatttttgaaaatgatgttgaattgtcatagaaaaatcaagaatagatatggaaatttagcttaaagaagtgtatactatacaatataggaggaaagaaaactatgtctaaaaagtatttatctatggatgggaatactgctgctgcacacgtagcgtacgcttttagtgaagttgcaagtatttatccaattaccccatcttctccaatggcagaaaatgctgaaacttgggctgcacaagggaagaagaatatttttgggtctgctgtaaatgttattgaaatgcaatcagaagctggagcagctggggctgttcacggagctttacaaggtggtgccttagcaactacatttactgcttcacaaggtttattattaatgattccaaacctttataaaattcaaggtgaattattacctggtgtattccatgtggctgcaagagcacttgcaacacgttcattaaatatttttggtgatcatcaagatatctatgcatgtcgccaaatcggagcacctatgatttgttctcatagtgttcaagaagttatggatttaggtggaattgctcacttaactgcaattaaagcaagtgtaccagttatccatttctttgatggattcagaacttctcacgaaattcaaaaagtagaagttatggattatgatgtattagctaacttattagatagagatgcattaaagaaatttaaacaaaatgctttaaatccacatacgaatccagttgaacgtggtggagctgaaaatgatgatatctacttccaaggtagagaagcacaaaataaacattatgaagctgttgttgaaatcgttgctgattacatgaagaaaatttctgaaatcactggtagagaatatgctccatttacatattatggtgctgaagatgctgatagagttattattgccatgggatcagttactgaaacagtaaaagaaacaattgatgaattattaaaacgtggagaaaaagttggtttagtaaaagttcatttatatcgaccattctcaccaaaatatctattagatgtattacctgaaacagtgaagaaagtagctgtcttagatcgtacaaaagaaatgggtgcaactggtgaaccattatacttagatgttgtctctgtattaaaagataaagacatcacagttgttggtggacgttatggtatgggttctaaagatacaactcctcgtcaaatcaaggctgtttatgatcatttattagaagaaaatccatttacttcatttacaattggtatcaatgatgatgtaactcatttatcattaaaagaagatgctgatttcactgtagaagctgattatacttcatgcttattctatggtttaggatctgatggtactgtatctgctaataaatcatctattaagattattggtgaccacactgatttatattcacaagcatattttgcttatgatagtaaaaaagctggtggagcaactcgttctaacttaagatttggtcattcaccaattcgtgcaacttactatgtaaataatgctgatttcatttcatgttcattagataactatgtattaaaatatgatatgttaaagaaccttaaaaaaggtggaacattcttattaaatacagaatttaatgaaactgaaattattgattatttaccaaataagttaaagaaacaattagctgataaaaacgctaaattctatatcattaatgcaactaaattagctgctgaaattggtatgggaagaagaacaaatacaattcttcaatctgcattctttgctttaaatccacaaattttacctattgaaaaagctgttgaatatatgaaagcaatggctaagaaaacatatggtaaaaaaggtgatgcagttgttgaattaaactataaagcaattgatgctggaaaagatgcaattgttgaagttaaagttgattctgcttggtctgaattaacagttaatgaaacacgtcaacgtactggtgatgatcattttgataacttcgtatctgttattaattcattagatggatatgatttaccagtatctgctttcatggataaacttgatggttctatgcaatcaggtgttgcaattaaagagaaacgggcaattgcgattgaagttcctcgttgggaaaaagaaaactgtattcaatgtaataactgtgtaatggtttgtcctcatgccacaatccgtgcattcttacttgatgatgaagaaatgaaagctttaccagaagatatttctaatgatgtattaaaaccaatcggtaaaaatgttgatggtttagtatatcgtattcaagtttcacctgataactgtgttggatgtggtttatgtgtaactgaatgtccaggtaagggtggtaagaaagctttaactatggttcctgttaaagaagaattagaacatgctcctttagctgactatatgtattctaaagtatcttataaagctgatcgttatccaacaacaactgttaaaggtgttggattcatgagaccatactttgaagtatctggtgcttgtggtggatgtggtgaaactccatattatcgtttagcatcacaattatttggtaaagacatgagaattgctaatgcaactggatgtagttcaatttatacaggatcaactccatcaactccatgtactgttgatgaaaatggagaaggacctgcatgggctaactcattattcgaagacaatgctgaatatggatttggtatgaaattagctgaaaattatatgtctaaacgtattttagaaattattgaagctcataaagctgattgtgaagctgaacttcaagaagttttaaatgaatatgttgctgtgaaaggtcaaagagttgaagaaagaaaattatatgatcgtttagtatcattagtagaagcttcagctaatgaaggtattaaagaattattagatatgaaaggtgaattagtcactaaatctcaatggatcgtcggtggagatggttgggcttatgacatcggatacggtggagttgaccatgttttagcaaatgatcaaaatgttaatatcttagttcttgatacagaagtttactctaatacgggtggacaatcttctaaatcttctcaagctggttctatcgctaagtttacagctggtggtaaagcagttgctaagaaagatttagctcaaattgcaatggcttatggacatgtttatgttgctcaagtagcaatgggagctaacccaatgcaaacaattaaagcctttaaagaagcagaagcttatgatggaccatcattaattattgcttactctccatgtatggaacatggtattaaaggtggtttagcaaatcatcaacaacaacaaaaacgtgctattgaatgtggatatttcaacttattaagatatgatcctcgtttagaagatgcaggaaagaacccattacaagtggattctaaagaacctgatttcactaaattcagagaattcttattaagcgaaaatagatttgctcaattatcaaaagttaatccagaacatgctgaagcattaatggaaaaatgtgaaaaagatgctaagaaacgtcgtgctcgtcttgacacaatggcagctgaataacaaatcaatgaagaacagtcgaaagactgttcttttcttatacaacccaatcataacaaaaacagataggtgagatttcatgaatctcatctttttctttgacaatttttttgaccatttttttctataatagagaaggggtgaaatcatggaggtctatttagaagtgacttatttaattaatgcattaatgattttattaacatttgaattattatgttatttattaaatatacagatgagtcaaaaagaattattgaaatatgtgcttacctataacctttcagttctttttctttatatagatttctttgatgggttcctcttattgtatgacttactcttgagtattttttattttaaaaagcttacttacatttattatcctttgtatctttttatttatatctcattgctttcttttttgagttggattcttccttcagcagttatctttcaatctgttttaattgttgaaggaatccattttatatctttactaatcattggtatattatgtcttttaattttttatttttatatttctttttgtcagcataagattcattcagatgaatatgtagatgtcaaaattgaaaatcatcaatgtttaggttttattgataatggtaataaagttttttataagggatatccagttatttttatgtcaaaggaattcttaggagattatcaaaagattgatagaattctcattgaaacagcgaatcaaaaagaatggatagatttgattatgattgatgatattgaaattaatcatcagcttttgcatcatgtttatgttggagtgatgtcatctcatgagtatgattgtattttaaattcgcagttattaggaggcttattatgattttacagaaattaaaggaattgttttatcgtagaaagacacttttttatattggcagacatgatgttttaaaagcacctttaaaagggaaagaggaagaagatgctttaacacgtttgaaaaatggggatgaacaggcgagagatttgttgattgaacataatttgagattggttgtttatgtggctaagaaatatgattctttgcaaaatgggagtattgaggatttgattagtattggaacaattggattggtaaaagctgttaatacatttaaaatggataaaaatataaaactagcgacttatgcatcacgttgtatagaaaatgagattttaatgtttttaaggaagaataataaattaaggcaagagatttctttggatgaaccattgaatgttgattatgatggaaatgaactgttattatcagatatcattggtactgataaagatattgttcaagatgaaatagaacataatgatcaaaaggaaaagttttataatgctttacatcatttaaataaacgagaacaacaaattttaatgatgcgttatggtttaattggacatgaagaattaacccaaaaggatgttgcggatattttaggaatttctcagtcttacatttcgagattagagaaaaaaattatcaaaaaattaagaatgaaattaaatgatgatgaataatgtcaaataaaatggtgagactttatctaaaggagtcgaaactatgtcaaagtacaaagttgaaatgaatggatttcagattcaggattgtgaaaaattatctcatcaacaaacaatgcaattattagatgattatcatcaaagtcatgatgaaaaaataaaagaacgattggttcttgcaaatttaaaattagtgttatcattagtccaaaaatatcatcaaagagtctctaatttagatgatttatttcaagtaggcgttattggacttattaaagcaatagagaattttgatacatctttagatgttcgcttttctacttatgctgttcccttgattatcggagaaataaaacgttatattcgtgataattcatcgatgcgtattccgcgttcgatgcgtgatattgcctacaaggctttaatggcaaatgaagaatttatgaagaaaaatcagcgtgaagcttctacaaaagaattgtcaaaacttttaaagattgatgaatacttgttagtagaagctctctcatcgacaaatagtgtaacatctttatcacaggaagtgcaaaatgatagcaatggtcaaattgacttagaaagtcagattcctgatcgtaaaaatcagatggaagatatgcaaaatcgcattgatttacattctgcgatgaatcatttagatgaaaaagaattgcaaattattttagaaagatattttcttgaccatacgcaaagcgaaattgccaaagaattatttatttctcaagctcaagtctcacgcttagaaaaacaagcattatctcatttaaagaaatatatgagctagtttttgcatatattataggggtgatatgatgcgatttgtaacaattcaaagtaaagatgtcattaatgcggcaacaggatcgaaaataggctatgtgtcagatatagaaattgatccgttttgtcggacaattcaagcaatcattgttgaacgttttaatgcatttaagttagtttgtgtattcaaaggtccgccgtgtttagtgattccaattgaaaatattataaccatcggggaagatgtgattttagtaaatgttgattgtgatatttaaaaagagtttgatgaaggaggacaatttcctctttttttcatagttatgttatggtataataatagaagaaatataaggaggttacctcatgggatacggacaaaaagtaaaaaaatggttttttgaagaagaagacgatgaagatgacgtttatgaagatgtacaaatagataacgaagaagaagctgtgaaatcaacaagtatgtttgaaaaagctaaatctacaaaaacaagtgatgcagttaaggctttaagtgccaataaagatagtcatttggttttatttgaaccaagagcttatagtgaaacacaggaaattgctatttatttgaaacaaaaaagagctgctgttgtaaatttacatcgtttacaaaaagaacaatctaaacgtgttattgatttcttaagtggggtcatctttgcgattgaaggagatattcaacaaattggacctaagattttcttatgtacacctaaaaatattggtgtttctggaaatatcacaatggatcctacagaatcagaagaataatatgagtattagcaattgctaatactttctttttggttatgttagaacactttaagggtgatgaaatctttgttaaaaagattttagattaccaatttcaagccctcaatcatcaaagaatgattttaacccctttttataatcctcatgaacaagagattgttagaaaagttattggtcatgaattacaagttttatctgatggcggattgattcatgcagagaatcaaaggatgattatttgtccagatttttatgaagttgtgccagatgattttgaaatatgtactgttgaagttgtttataatgcacaatttggtcgtttacaacataaagacttactaggagctttaatgaatctaggcattaaaagagaatgcattggagatatttatgatggttcatctttatattttgcttgtacaaagcaaacttttccttatattagagatcatttaacccaagtgaaaaaatctaaggttaagttacgtgaatcgacgcaaaacgtggaaattatacatcagtacacaacaaaaacatttattttatcaagtttacgtttagataaagttgtttcaacaatctttaaagtttctcgacaaacagcatgtgatgcgattcgggcaggaaatgtcaaagtcaatcataaagaggttgaagaagtcagctttttgtgtcataataatgatatgatatcttttaaacgtcatggacgtgttaaaattattgatgaacagcgtcaaacacgtcaagggaattttgttgtaacaggttatttttataagtgaggtggaagttttggaagaatttgataaacaatttcgtggctacaatattattgaagttaatgatcgtattgccgaattaaaggaacaattgtctcaacaaaaagaaacaatacaaactcttgaaaaagaaataaaaaccttaaaagaagaaaagactttacttacgaaacaaataactgtacaagaaaagacaaatgaagaaattgcacgtttggctttaaaagaagcaagtgaattgattgaaaaagccaaaagaaatgccaatatgattttaaaagaatcaatggaatatgttcgcggattatcgaaagatatggatacatttaagcaagaagctatagattttagaaaaaatgttgtaaaaatgagcgaagatatgctagaaactattgacaaatctgaaatttttagtttaataagagaagaaaaagaaaataaatacaatgacggagacagtttataaagaaaacttctagagagcttgtggttggtggaaacaagtaagtggaatttataatgaatcactccccagtagcaatcctgaaatcatagtagggtgcgccgtgaatcgcgttaagatgttaagagcatatcgcaagatatgaataaaggtggtaccgcgttaacacgtcctttaattaaggacgtttttttatttcagaaaggaaggataaaatgaactataaagatacgctattgatgccaaaaactgaatttgaaatgagagggaatcttcctaaaaaagaaccaggatatgttgcaagatggcaagatgcacatatgtatgaaaaagttattcaacaaaatgaaggtaaagatgactttgttttccatgatggtccaccatatgctaatggaaatatgcatgttggacatatgttaaacaaaatcattaaagatgttatctgtcgttataagaacatggaaggatattatacacctttcattccaggatgggatacacatggtttaccaattgaaaatgctattcaaaaattaggtgtcaatcgtaaagaattaagcacagctgaatttagaaaaaaatgttatgaatatgctttagaacaagtcgcaaaacaaaaagaacaatgtattcgtgtaggaacatttgctgattatgctcatccttacttaacattgttaccagaatttgaagccaatcaaattgatgtctttgcgaaaatggcaatggatggattaatctataaaggattaaaaccagtttattggtcaccatcaagtgaatctgctttagctgaagctgaagttgaataccatgatgttaaatcaccaacaatctttgttaaatttgctgtgaaagatggaaaaggaatcttagatacagatacaagctttgtcatttggacaacaacaccttggacaattccagcaaatcttgctatttgtttaaatcctgattacacttatgcgttagttcaaagtgaaaaaggaaaattattagtcttagaagaattggttgattctttatgggaaaaattcggtttacaacaaaaagaaatcttacaaagattcagtggtaaagaattagaaatgattacatgtcaacatccattatatgatcgtgaatcattagttatcttaggagaccatgttactgctgatgccggaactggatgcgttcatacagctcctggatttggtatggatgactttattgttggtcaaaaatatggtttagatatttattgtaatgttgatgaacatggaaatatgatggaagattgtggtgaatggttagctggtcaatatgttgatgatgcaaataaaacagtcacaatgaaattagatgaattaggtgttttattaaaacttgaattcattacccatagttatcctcatgattggcgtacaaagaaaccaattatctttagagcaactgatcaatggttctgttcaattgataagattagagaaaaattattaagtgaaattgataaagtcaattggttaaatgaatggggacatattagaatctacaacatgattaaagatcgtggagactggtgtatttctcgtcaaagaagctggggtgtaccaattcctattatctattgtgaagatggaactccgattatggaagaagctgtttttgctcatatttctaagttatttagagaatatggttcaaatatttggtttgaaaaagatgaaaaattcttattaccagaaggatatacaaatgaacattcaccaaatggtatctttagaaaagaaaaagatattatggatgtttggtttgattcaggttcttcacatacaggatgtatgagagaacgtggatatcgttatccagttgatttatattttgaaggtagtgaccaatatcgtggatggtttaactcatcattaatcattggtactgctgctcatggagaggctccatataaaacagtcttatcacatggatttgttttagatggtaaaggaaataagatgtctaaatctttagggaatactgttgatccaattaaaatggttaatcaatatggtgctgatatcttaagattatgggcaacttcagtcgcttatcaatcagatgttcgtatttctgatgaaatcatgaaacaagtagctgaaaattatcgtaagattagaaatacaatgcgttttgttcttggaaatttaagtgattttaaagcaactgatattgttgatacaaaagacttaaaaggtgttgatcaatatatgttagttgaattaaataacttaatgaaaggttatcatgaggctttagataactatgattttgctgaagcaaatcaattgatcttaaattgctttacaaatacattaagtgctttctatatggatttcacaaaagatatcttatatattgaaaaagctgatagtttaagaagaagacaagttcaaactgttttatatcattatgcaaaaacaatgatgaaattattatcaccaatcttagtctttacagctgaagaattacatgatcatttccattgtgatgaaaataaagcagaatcaatcttcttagaagcaaaaccagaaatgattgaagttgaaaatgctgatagtataaaagaatattatgatcgtttcttaacccttagaaaagatgctatgaaagctttagaagaattaagaaatgaaaaagtgattaaatctaatatggaagcaaaattaactgtatgcttaaaagatgaatatcaagatatggcaaaattagctgatgatttaaaacaattattcattgttgcaaaagtcaatttagtaacagatacaacagatttaactgaatatgaaacagcttatatcaaagctgaaaaattcaatggggtacaatgcccaagatgttggaactattttgaagaatcagaaatggaaggggaattatgtcctcgttgccatgaagttattaatggttaaaaaagaaaatggtacatatgtaccttttctttttagaaaggggaagttatgagtcaaaaagtgagaggtggcttgttattattaacggcagctttaatatggggaagttcttttattgtaatgaaaagtgcagttgattttctaactccagcagtcttgttgtttgtcagatttacacttgctgccatctttttatcaatcttattttttaaacaattaaagaattatcctaaagataaaattgttggtggtctgataacgggttgttgtttattttgcgcatattatgtacaaacatggggacttaattttacaactccaggaaaaaatgcatttttaacagcagtctattgtgccattgttcctttcttggtatggttgttttatcataaacgtcctgatatctataattttattgcagcctttatttgtgttttagggattggttgcgtttcattagatgggaacttatcaatgaatatcggtgattttttaacattgtgtggaggctttttatatgctgttcacatcttgatgattaagaagttttctaaagatgtagatggtggggcttttacaacattccaatttattggtggagcttttgtggctttgtttatggccttgtgttttgaagatatatcagttgtgacacagattcgctcatcaattttcttacaaatattttatttagcattctttgctacagcggttactatggtttgtcaaacaattggtcaaaattatacaagtgaatgtaatgcttcattaatcttgtcattagaatcagtatttggagttgctttttcagtaattttttatggtgaagttttaactttaaaggtgattttaggctttgtattgatttttgtagcagtgattatttctgaaacgaagttagcctttttaaagaaaggtggaatgattgatgaagaaaattgctagtttattatgcttgttcattcttttggtaacgattcaaccagttcaggcaaaagaaatacaacttttttcaaaatattattatctttatgatcgtagtaatgaaatggtttatcttgatgaaaaaagtgatgaaaaaatttatccggcgagtatgacaaaaattttaacagtcagtttagctttggataaaatcccagatatccatcaaaaagtgacaatcacaagtcaagatattgatggcttattagccttacaagcaacaactgctgggttttatgtaggagaacaagtgacctatgaagatttgctttatggagctttattgccttctggagcagatgcatgcctagcgttatcacgattaacatatggttcaaccaaacaaatggttgcagctatgaatcaaaaggtaaaatctttaggtttaacccatagtcattttcaaaatgtaacaggattacatgatgacaatcattatacaacagtcaaagatatggctcagattttaaatcatgctttatcaaataaagagtttgttaaagtctttaatgcaagagaatacacaagttcctcaaaccatcattggatttcatctttacaaagaggaaaagaatataaaggaattgatgtctctcatattgatggtggtaagagtgggtttactgatgaagcccaattgacatttgcaagtaccatgacgattgatcatcatcaattgattttggttacagcttatgctaaagggcaacatagtcaaaatcatgtcaaggatgctgttcacgtttgtgattatatgactaagaatttttatgaaattgttttatataaaaaagatgaaacgattcaggattattggatttttccttcttttcaatttcaatatcattatccagcctatcaggatataagtttattagtatctcgagatatttcaaaaaacgatttaaaatttgaagttgaagggaaaaattatttactattacctcaacataaaaatcaacaaattggaaagttaaaagttcaatatcaacaaaagacgatctatgagtatccattgattcttactcatgatattcaatcatcaatgatggatacaattggaatttatgggattctcatttgtataccagttgccttagttggaataattgtcactattaaaagaaaaaaagataaacacgattaattcgttgtttatccttttttttcttgttttaattctataatacgatcaattccataaccaattgtacgacctaggaaaattataatgacaccaataaatggtaatgcagcattcttttgtgtaagaatataataaaaaatcaatccaaatcctagaacatatccaatatttgtacaaatgtacatatattttgtagtttttaatttattcatttttccacctcattttagacatattttattataacatctttcattattttttcaatactgttataatgttagttgttaaggagggcttatgaaaaaaggatgtctttttgatttagatgggacattggttgattcattgactgatttagccttatctacaaatcgtgtattagagcttcatcatctacctacacatgaattatcttgttataatcaatttgtaggaaatggagtaaaaaagcttatggagagagcgttaggaagtgagcatttagatattttagatgagtgtttagctgattttcataaaatttatgaggaacattgtcttgaccatacattaccttatccagggattgttgatttattagaaacattaaaagctcatgatatcgctttggcagtcgtgaccaataaacctcatcatttagctattaagattgttgaacatttattccccgatacttttgtaacaattttaggacaacaggatttatatccgattaaaccacatccgcaaattgtacatattgctttaatgacccttaaaaaaggacgtcaagaatgttattttatcggtgatagtaatgttgatatagatacaggatatcaagctgatatggagacaattggcgtgacgtggggatttagaggaagaaaagaattagaagatgcaggagcggattttgttgtggatgaaccttttgagattggagaaatcgtattaaatgataggagttagtgcttgtttgattggtgaaaattgtacttatagtggaaaaaataatctggttttaggactcaaacggctatatgaattaggagaagttgtttgtgtctgtccagaagtcatgggcggattatcaacaccgcgaaatcctgctgaaatccaaagtgttgaaccacttttgattacaactaaccaacaagtcgatgttacaaaagaatatcttgaaggagcaaaaaaagcaatgagcatttttttagctcatgatgtcaaggttgctattttaaaatttagaagtccaagttgtgggtgtgatggaatttatgatggaactttcagccataaacttattgatggacaaggcgtttttgcaaagatgtgtgaagaacatggaattaaggtttttcatgagaaacaaatagaggaattcttaaaatatataggaaaggaagatgaatatgggacatattttaaagattcaaccagtatttaaagaaatgatttggggaggacataaacttagagatatctatggttatgatattcctagtgatcaaacaggggaatgttgggccatttctggtcataaaaatggcgactgtgtgattgcagatggagaatttgccggaaaaacagtgtcttggctttgggaaaatcatagagaattatttggaaatgtagaaggtgatcaattcccattattagcaaaaattattgatgcgaaaaatgatttatcagttcaagttcatccaaatgatgaatatgctgcaaaacatgaaaattcattaggaaaaacagaatgttggtatgtattacaagctgatgaaggaacaaagatggtcatgggtcatcatgccaaaacaaaagaagaatttgtaaaagctattgaaaatgatgattatgataacttattaaattcatttgaaattaataaaggtgatttcttctatattccttcaggaacattacatgcgatttgtagtggttctttgatttatgaagcacaacaatcatcagatattacatatcgtgtttacgattatcatcgtaaagataaagatggaaaagaaagacaattacatgttcaacaatctattgatgtgacgactgttccatcaaataatgattcgaataaattatttacaaatactcatttagatcatggctctaaaacacgttatgttgaaagtgaattctttactgtggattgttatcgtatggaaggagaaaatattgttgtgaatgataaacctttccaaatggtaagtatcttagaaggtgaaggaacacttgatggacaagcagttaaaaaaggtgatcactttattgtatgtagtgatcaaaaagaggtcgtatatgatggtgtgatgactttaatgataacaacactataagcaaagcagattttatctgctttttttcaaaggagaaaataatggaacaaaaagattatgctctttcatgtatgaaagaatggctttcacatgaaaatgaattagggaaagaaccttatcaaatagaaatggctggagaatttgatttacatgatttacattattatatctttaaatttaaaaaatcaatgctttccccttggcaaattggtgtctgtggaggatatcagggagatgagctaggacattgtggacatatttttagtcagtatgaaaaatatgatgagaaaactgctcaacaaaaatgtattgatatggtagaaatgattcgagaatattggatgaatgaagctaaaaaacaagaaaaaccagaacctcgaacaacttatgtacattttgtattattagaaaatgatcatattgattttcaaaagatttttgaatatttaaaaaatcattggcaaattgagattaaagacatcaatgaaaatgaagatgccatatatgttggaaatgtgaaagattcaatggtttctttatcattgatgaatgtacccgtaccagaaggagaagcagaatactatgcacagggatgttatatgtgggaagatgctgtgaatcacgttaaaaagcaccaagcacatctcattgtttcaacaatgggaaagaatttaacagatcgtgaagcattgcttttacaaagtcagctgattgatgcatgtttgcaagcacctcagacaattgctgtttatggtgatgaaatggtttggccaaaacatatttatacagatattatgaatgattattatcaaaatcaaatttatccagttgcaatttgggtgtatttaggctttgttacaaatagtgatggtcatcatatttatacaattggattaaagaattttggacattatgaaattgaaacattaccatcatcattaccacttagtcaacttcatgaatttatgtttaatgttgtttgttatattgttgaacaaggggcaatcttacatgatggggaaacaattggaatgagtgaaacacaaaagtgtcaaatttctttaagtcaagggatgtttttagatgaacaaactttaaaaatagaaattgttgatgatttaaactaaaattatttgaattatttatattattaatctataattgaattataggagggatagtatgaatagaaaaatgattggatctcataaacatggatggcttgttgataatgaaaaaagggaatttgtttattttgatttgttgagtttatttgaaaaaatgcaagggaaaccatcaaagcatgttatttcttatgcggatatagattatattcgtattgattatagcttggttgatccagttaaagggatgggttctacaacgcttattttagaagttcataaaaataatggcgagattgaatcagttcctatttttacttttgcggttgaaagaaaggattataatgagtttatccaagtcttaaaagattcacaattaagaatcgttgatcctcaaaaatgtcttgatcttattttagaaagtcaagaactgattggaacaattattagtcaattgataaaaaaggctagggaagtcacttcttagcccttttcaatataagaaatttatggcataatagaaacgatgaaaagagggaaaaatatgtcagatatatatcaagatgctttaaaactacatgcagaagttaaaggaaaattagaagttcaattaaaagtaccacttaatgaaagtcatgatctttcattagcttatacccctggagttgctcaaccatgtcgtgaaattgcgcaaaataaagacaatgtttataaatatacatggaagcaaaacagtgtagcagttgtaagtgatggaacagctgttttaggtttaggtgatattggaccagaggccgctatgcctgtaatggaaggaaaagctattctatttaagaaatttggaaatattgatgcagtacctatttgtttagataccaaagatccaaaagaaattattcaaattgttaaagcgatagctccaacatttggaggaattaatttagaagatattagtgcaccacgttgtgttgaaattgaaagaactttaattcaagaattagatattccagtttttcatgatgaccaacatggaacagctatagttgttacagctggacttttaaatgccttgaaagttgttgggaaaaaagttgaagatattactgttgtggtaagtggaactggtgcagcaggaagttcaattattaaaatgattcattcactaggtgttaaagaaatttatggttttaatatcaatggaattgttacaaaagaagattatgatcaatatgatttcttaactcaagaattaacacaaattacaaatcgtcaaggaaaacgtatgacaatggcagaagcaatgtgtgaagctgatgtctttattggggtttctgctccaggattattaactcaagatatggttaaaagcatgaaagcaaaaccaattgtttttgcaatggcaaatcctgaaccagaaattaaatatgatgatgcaattgctgctggggtaacagttatgggaacaggacgttcagattttcctaatcagattaataatgtcttagctttcccagggttatttagaggtgcgttagatgttcgtgcgaaaaagattagtgaaggaatgaaattagcagcagcaaaaggattggcatcacttgttagtgatgaagaattatcacctacatatgtgattcctaatgctttagatcctcgggttgcaaaagttgtagcagctgcagttgcaaaagaagctagggatgaaggattagcaagaatttaagacacgattgtgtctttttttctttaatgttataatagtggggcaaagataaaaacacaatgtataattttatacagatacggttggtagtccgtacgtgagtctgactcataagtaaccttcctccttaggtcgtccattctttgtttatacttttttaaggaggacatatgatggacaaagtatcaatgacattgacaatttattttgaaaatcctttctgggttggaatttttgaaagggtagtagatgcaaatttaatggtggctagaattgtttttggtagtgaacctaaagattatgaaatctataactatattttaaaatatgattgtcaattacaatggagtccaagtgtttcattggacgataaaacaaaacatgtgaatcccaaaagattacaacgtcttgtgaaacaacaaactcaaaatgttggcatttctacaaaatctcaattggctttacaaaaacaacaagagttaaaaaagcaaatacatcaacaactcaaacatcaaaacaaagagatgaatgctaaaaaacgttttgaaatgaaacaacaaaagaaaaaaatgaaacatagaggaaaataattttctctatgttttattttgttgacaaatacatactacagatgtagtatgataatagagactacagttgtaggaggtgaaagaatgcaaaaattatcagatgcagaattagcagttatggaagttttgtggagtggtcatgagtttgtgttaggagaacttgttgaggctttaaaacataagaaaaaatggagtcgtaatacggttcatacttatttgacaagaatggaaaagaaagcattagttaaaattaatcgtagtcaggaaccacatttatattcttatgttttaacaaaggatgaatatcttaaggaggaacgtaatcatttgttaaatcgagcatatcaaggctctgtaagtgatttgattagtgcatttttaaaagattcaaaaattacacctgaagaaaaagaagaattaaataaaattcttgatgaaatggaggtctaatgatgataagtatatggggatggctgattcaaacgatagaagtatcagttgttgcagtcatgatcttatttttaaaaaaattgtttcaagataaacttcctccaaaatggcaatatggaatctggattattttattattgagtcttttattacctgcagggatgtttggcacatcgattgtaccaacttgtcgaacttatatcgaagcgattaaaacaatcgtagaaacaccccttcaatcagcttatgttgatgtctatttgccaattaagaatagttttttctttccatttattacagctttacctaaaagctttactgattatctttttatgatttatataagtggtggtttattttatctaggaagatattgttatcaatattatcgtttacgtactttattgacatatggacaaaaacctcaaccagaaattatcagccaactcaatagaatttgtgaaacatatcattttcatccatgtcaagtcattgttatgccagaaattccatcagcattcgtttgtggaattatgaaaccaatattggttttaccaactcaagaattaattgatgataagataattcttcatgaaatgtttcatttaaagtacaaagattcccttcaatgtgtgatttggtcatgtttaaaatgtattcattggtgtaatccttttttacattatgtttttcatcatatcagcaatgatatggaagctttatgtgatcagagagttttagaggtactagaaggagaacaaagacgtgattatgggagaatcttgctttcgatgacaaatcatcaatatcctcatgcttttgcaacaacatcgctatcaaatggtgctaagaatataaaaaaacgaattgaggcaatcgcaagatttaaaaaatatccacaaggaatgtcaattgtttctgtctgtatttattttttacttattcctgttgttatgggaagtgtgagttcttatacattacttcatcattcatttttacctcattcttttgcttatcagctatctatggcatcagctcgtctaagtcaatgtgaaagtgtagaaggggcaattgatacttatgcaaaaggattactcacatataatgagcaatacttattatctgttttaccaaggcgttattattcatcgtatcagcaagctatgaaacaattaccaacaaatataacatcaacaggagtaccttacttatatgaagtgaattgtctaaaaaagatcaatgaaaatgaatatcatgcctatctatgttttaacaattgtgaatttcaagaagatcaaccagcaaaatctcattatatggtgatacctattcaagtgattaaagaaaatggttggaaagttaaacaaacaaaaaagatttatgaagaagatgttgagtgtatagataatctcatgggaagtgagctttttcaaacatcactctataaaaaaataataaaaaagtgcaagagcggtcaattagaattgactattagaaatgctaatagcatcatagattcgcaaaatcagacgaattcttttttaatgaatacaccatctcactcattgaattatcaaccacgagcccattttaatgctgcttatcaaagtgttgaaattgattatatcaatacacaaccaaaatctatacaagataaaatcaaaaatatatatattgaaattaaaaatcttgataatattaatgatgaagttgaatttgaaaaacatgacaatcctaatcaatatggttcaagtggtggagcatcagataccgatgctcatcatttacaacatttagatagtgattggaatcatttaatccatttgactcattgtacattttattatgaacatggaggttttccaattcctcaggcttatgctttacagattgtaatcaatggagaagatgaagaaatcttaaaaatagatgtgaaagatggtgaatggcatgtcccagaagaattatatcatggcgatttataaaatagctattgctaatgttcttataatttttaacttaaatatagggacagtcaatcttataccaaattggttgggctatctcttgttttatgatgctgttcatgtcattgttcaatatgaagaaagtgctcaacttttaaaaccttttgtgaaaatattaggaatctatgaattgattgcttgggtcttggcatgtttggcaatttctactgattcttattcaatcatatatattttgatgcatattatcgaagtctatttctattttcaattattaacgaatatttctcatattgcctttatgcatcattatgatcaacttgctaatcagcttaaaacattaaggacgcttaaattaatatcaattactttatttgctttatcatggaatgaatattttaaaattggaataaatatattaaacattatattaacgctttgggtttgtgttgttttgttacaatatgcttatcttgaaaaaagcgaagatcaaaaaaaagaactggcagattaatgccagttttcttcttaatacattccaggagcacccattgctggagtagcaggtgtatcttctttaattggagcaacaccagcttcagttgtaataaataaagctgaaatgcttgctgcatttaataaagcactacgagtgactttggttggatcgataatacctttatcaaacatatctacccattcaccatttttagcatcaaaaccttgaccatattctgctttcatttgttgttcaacaatttcatcactgttaaatccagcattttcagcaatttgtcccattggtgcaagtaatgcatctaaaacagttttaatacctttttgtttatcaacattatcatcttttaattgatcttttaaagcaacataggcattaactaatgtcacaccaccacccataacgattccttcgctaacagcagcttttgttgcatttaaagcatcttcaattcttaatttcttttcttttaattcagattcagtggctccaccaactttgataatggctacaccattacttaatttacctaatctttcagcataatttttcttatcataatcactctttgtattattcatttgttgagtaatttcatgaatacgtgcatcaattgctgctttttctccagctccaccaatcattgttgtatgatctttggtaatatgaattttcttagctgaacctaaatcttcaatctgcatatcttttaaattcatatttaaatctttattgaagaattttgcattcgttaaaatagcaatatcttgtaagatttctttttggttatcaccaaatccaggagcttttgtagccacaacattgaaagttcctcttaacttattgacaactaatgtagaaataacttcttgttcaaaatcatctgcaatcaacaacaaaggtttattagattgcataacttgttctagaattggtaagatttcttgaattgtattaattttttgatcagtgaccataatcaatggattatctaaatcaacagtcattttttctctatcagaaaccatgtatggagaaacataacctttatcatattgcataccttcagcaacttctaattcagtatcaaagctatttgattcatcaacactgataacaccatcacgtccaactttttccatcgcttttgcaataattttcccaatctcttgatcacccgcagaaattgttgcaacactttcaatatcattacttgtttcaacaatatgtgatttatctaaaatatatttagcaacttccttacttgcataatcaataccttcacgcattaaaacaggatttgcccctttttcaacagcctttaaaccactttgaatcatactttgagctaagattgttgcagtcgttgttccatcaccagcaacatcatttgttttattagctacttcataaactaatttagctcccatattttcaaaagcatcttctaattcaatttcttttgcaatagaaacaccatcatttgtaattaatggagaaccatatcctttatccaaaacaacattacgtcctttaggaccaattgttacttttactgcatcagctaaagtattcacaccatttaacatcgcatctctgacatctttagaaaaacgaatctctttactcattttgtattcctcctattcaataatagccaaaatatcttcttcttttaaaatcatatattcagtttcatcttctttaaatttagttcctgaatattccttaaaaataacattcattccttcttttaaattttcatcacattgagctcccactgcaactactgttgcttgattgctcgcttgttctaattgagtcgttaaaataattccactagcagtctgactttctgctttttctttttttaaaatcacataatcatgtaatggttttaacattttgaatcctcctttatatttagcactcgcaatctttgattgctaacactgttaattataatctcatatgtgaactgaatatgaacatttagcacttcgcaaaagaaagtgctaaatagctttattttgaattgtagatttagtataataagaaaaagtgggtgagaaaatgcaaaaaagacaagaagtgattgattattgtttaagatataaaaatgtttacgaagattacccttttagtgatcctaattggacatgcatgcggcatttagaaaataagaaagtctttgcctggatttatgaaagacaaggacatatttgggttaatgtgaaaggaagtaggggatggctagatttttttagagaaaagtatgaatcagttgttcctggttatcatttaagtaaagaacattggaattctatgattttagatggaacgattgctttagaagatatttatgcaatgattcaagaaagctatgatttaacccttcctaaaaaatatcgtcagtaattgttttattcatcgattatcgttataatagatgtgggaggaatcaatctatggcaaaaaaagaaaatcgatttgtaacggtttatgaacagaagtattttacttctggtacagaaattcttgtagataaaaaaacaggagtcaattatttgtttcatcaaagtggtaatggtggaggattaacggttttagtagatcgtgaaggtcatcccatcgttacaactatttatccagatgaagaataaagaaaggagattttatgaaagctatttttaatcattgtaatattaatgttacagatttgaaaaagagtattgctttttataaagaagcattaggtttagaagttgttaaagaaaaggaagccagtgatggaagttttaaactcgtttatttaagtgatggggtttcaccattttctttagaattaacttggttaaaagatcatcctcaagcttatgaattaggggaaaatgaaagtcatatttgtttgactgttgatgactaccaaaaagctcatcaattacatcaagaaatgggatgtatttgttttgaaaatgaagcaatgggcttatattttattcatgatcccgatgattattggtttgaaatcattcctagcaagtaatacatttattgtattacttctttttttattgacaatatcgtttaacgataatatactgaaattgaaggtaatatcgttatacgatataaggaaggtgaaagaatgccaagagttcaattgaaaacattaacagaacaaatgtactatgttttattagcccttcaagatgttcgttatggttcagaaatctcacagtatgttaaagaattaaccaaccaacgtattcaacttggaccaggaaccctttatgccattctttctaagtttgaagaagaacaattgattgaagaagtcaattgtgaaggacgtaaacgtagttatgtgatgacaaacaaaggggttgaaatgttttgtcatgagtatcaaaggttacaatggatgatagaagataccaagagggaatatcatcaatgatagaaaagagggattcttatgaaaaagtactttaatttaactgggttttatccgtttgaaagaaaacaatttgaagatttcttaaatgatatggctaaaaaaggatatcatttaaaaagctttaatagtttttttagtgaatatgaagaaaataatgatgaaatttattatcatgttgcaattaaggaaaagaaaaacatgatttttaatgaaccatgtgatgaatcttatatgactttttttgaagataatggttatcactttattgataaacaaggaatcttttatgtctttgctacggataaaccttgtgaaatgtatactgatgaacaaattgatgaagaagttatcaaaaaacaaagtattaatggctttaagaattatatcattagtttggttatttttcttttattagggggattttttggttttttaactttatcttttgatgatttattatcaacagaaaatattcttgatttttattttctaagaataaatattatatttataggatgttgtagattgttttttatctattattttatgaaaaaagaggttcattattcttatcatcttagtcttattagagattattgtttaacatttgtagtaatgttgttgattgtgggaaatgagttctttaccagaaactttatttatcttccgctatttttattgatattgagtttaatacttgctattgttatttgtatttacggatataaaaaaagtaatcctgtcttattacaaaaatatgctctttttcttttcatcatgtttgtgggtttaggaatctgtggacaaatgaaaaaaatcaataacaaatcatcttatatcaaaccagctttttctttgattcaagattatcaaataagcaatgatagtcattctatagctatagattattatgaatatcaaaaagaaaataaaataatcaaatatgttaatatacttgattatcaaaagagtttagatattttaaatctttatcttcaagatcattatacaaaatatcaaaagcatcaaatcgatggatatcttatttatcaaacaccgatttctacaatcatttataagaatcatcaatttattgaaatgaaaaaaatagagaatcaacaattcaaacaattcttaatctatttaaattggtaaaaaaagagatctaaaagatctcaaaggtttcatctctatgatgaacaggaataatatgagcttgatagggattatcaagcttttcattttgtaattgttgagtgattgtataatcaccaaaatagtgaataggcataatatatcttgttttgacatgctttaagaaatattgtaaaccaagtaaatagctttcttcttgtcttttatctacaacgacaaaagccaaatcaatagggtgttgaatagaattgatttcttgttgataaatttctttttgccaaaggttgtctttttctggttcaccttcccaatgccaccagtttaaatccccggcaaagtaaatggtttgctttttggtctctactaagaaagcacagccttcatcagtagatagtaaagttttgactttgatatcatcaaaaatatattcttgatgaacatcaacataattggcttcatatttatgacgtaaagtatcagaaagaatataagtcttgtgaggatggtcgagtttgaaaatttctggattataatgatcatagtgacgatgagaaacaaagatataaagtggtttttctttattgagattaagcttaccttgatagtaatcaaataataatagatgattatcaagctcaatcaagacaccactatggaataaatgtgtaactagcatataaaaaaagataacatgaaaatcatgttattcttcttctccatcatcatagttagaaacattatggaaaatttgatcgacatcatcacaatcgtttaataaatccattaatctttcaaataacatcatatcatcaccttcaagttctacataatcttgaggtgttgttgtaatgtcatcaacatcaaactcaacatcagattttgctgcttcaattgcagttttaattttatttaaatcagtaggttcaccagtaactttaatacgtccatcttctaaagttgtaatatccttagcatcaacttcacccatgattaaagcatctaatgcttcttcttcactcataccaccgaaaacaactgtactttctacgtcatataaataagatacagaaccttcagctcctaatttagatttagattttgtaaatgctggacgcacttgagaaattgtacggttgatattatcagttaaacatttgacgataagtgttgaattgtttggtccaaaaccttcaaattgaattggatcatagttttcagtggcaccacttttaaccttatcaatagcacgtttaataacgtcagcaggaacttgatctttctttgctttttcaattaaacgtcttaatgttaagtttccatctggttcaggcccaccagctttcgctgctaaataaatttcttttccatagcgagaataaactttggctttttttgctgcagttttggccatagcgaccttacgcacttcgtgtgctctacccatttgtaattcctccttttaaaattccttctgtattataaacatttttagatgatttttcaataaaaaatggtataatcgttgtatttcgtataaaatagttgtagaggtgtattgaaaatgcaaaaagtattgattgtaggggctggagcttctggggtttatctgtcgattttattaaaacagaaattatatgattgtgatgtgattgttttagaacaaaatacggcacctttaaaaaaggttcttgctactggaaatgggagatgtaacttatccaataaagatatgtcaattgattattatcaaagtgataataatcaattggttgaagaaattatttcttcttttgatatggttcaagcaatgaatgatttaggattgtattgtatatatcaaggaaatttattatatcctaaaagtgagcaagctttatctgtaaaacagattttaatgcaaagagcagaggaattaggggttttatttttatatgaacaagaggttttaaagattgaaaaagggtatccttatattgttaaaacaaatcaacaacaattaaaggctgattatgttatttttgcaatgggaagcgaagcaggtcgtttatcagggacacagttatcacgatatcaaatcttaagaaaattacatttaaatgttgttgaaccaagaccagctttaacacaattttttactcaaccagttttaaagtcactaaaaggggtaagagtgaaaggaacatttactttattagaaaaaggaaaatgtgttcatcaggaaaagggcgaattgttgtttactgattatggggtcagtgggattgcgattatgcagctttcagcattttgcaagccacagcatgattatgaattgtcaattgacttttttgatgaagaagatgcaaagaaattgtatgaatatattgaacttcgtcgcaagaagggctataatcatttctacgatggcttactcaatagtaaaatatcgctttattttgaaaaacaggcattgaattcaacccaagaaattgtttcaatgcttaaagattttcgtttacatattacagggctaagatcttatgaaagtgctcaggtgatgaagggtggattgtcactgaatgaacttgatcataacttagaacttaaaaaatatccacatatctatgccattggggaaatattaaatgtgataggtttatgtggaggttataatttacattttgcttttgcaagtgcaagtcatgtcgcaaaagcgttagagagggaatggaatgttacgaattcataacgtgaaagtaaaattaggtaagatggatgaacgtaaaattgtttcacaagtcttaaatgttcgtgaaaaagcaattagaaatgttcaattgtctaaacaatctattgatgcaaggcgacaaaatgttcattggatatgtagttttgattttgaagttgatgatgaagatgcgtttataaaaactcatcctcaagttcaaaaagttaaaccatatcagtatgtttataaacaagcaaatgataaaaaagttgtcgttgttggaagtggaccagcgggcttgttttgtgcttatacgcttgcttgtgcagggcaggatgttacagtcatagaaagaggaaaaaaggttgaggaaagggttaaagatgttgatgcattgatgcatgagggcatcttgaatccgatgagtaatattgcttttggtgaaggtggagcaggaacattctctgatgggaaattgacaacaggaattaaaaatcatcgcttaagatatattttagaaacttttgtaaaacatggtgcacccaaagatattttatatgcatcaaaaccacatattgggactgattatttaagaaaagtattgattgatatgcgtcattttatggaagaaaaaggggtgtgtttcatgtttgaaacacaaatgattgattattcttctaaggcccaaggatatcaagtgaaagtgaaaaaaaatcagcaaattcaaacgattgatacggatgtccttgttttagcaattggtcatagtgctagagatacctatgaattgctttatcaaaaaggcttgccaatggaagctaaagcttttgccgtaggattacgtattgaacaatcacaagaaaaaatcaatcagatacaatacaagaaaagtgctcattcgccatatttaaaggctgcaccttataaattagcagtccaaacaagtgaaaaaagaggggtctatacattttgtatgtgcccaggtggttatgttgtaccttcacatcatgaagcaggaactttatgtgtgaatggaatgagttattatagcagaaatgctaaaaatgctaatagtgcgattttggttaatgtcatgcctagtgattttgaaagtgatcatcctttagcaggaattgcttttcaacgtcaattagaagaaaaggcatttaagctagggggagaaaattatcacgctcctgtgcaacttgcgatgaattatatcaatggaacgaattatccattaggcaagattgagccaagttatttaccaggttatacattaactgatttaaatcaattatttcctgcattcattaatcgtaatttaaaagaaggcttgatgttaatgaatcaaaaaatgcctggttttattgatgaagatacattattaactggggtagaagcgagaagtagtgctcctgttcgtattttacgtaatgaatatttagaatcttcaagtcaaggaatttatccaattggcgaaggagctggatatgctggtggaattatgtcggcagcagttgatgggatggtttgtgcagaaatgattttgagggaggataaaaatggaagctgttgattttcataaaggaaaaaagaaaaaagttttttcaccaacaaggcgaattgcttttagtttctttatggtcatttttataggatcattgttgttatcgttatcaatttctaataagggagcagtcattccttatttagatcatttatttattgccacttcggcaacttgtgtaacaggacttgtacccattgttgttgctgatcaatatacactttttggtcaattggtgattcttgcattgattcaaattggtggattaggttttttaacacttttaaatatgatgttagttgcctttaaaaagaaactttcttataccaataagattattatgcaagaggccttaaatcaaagctcaatgcgagcaatgggaatatatattaaaagggttatcaaatatacagcaatctttgaattgactggatcagtgttattaagttttgtctttgttccggaatttggtttgataaagggaatatattatgcatgtttccattctatttcagctttttgtaatgccggatttgatgttttaggttctaattctttgattaactatcagacaaatctgttagtgaatttagtagtagctggtttgattattgctggaggacttggatttattgtatgggttgatttaaggatggcttggaaaaattataaagataattttaaagtctttaaattacgtaaatttatggcttcattatcattacatactaagattgttttatggattacaagtattttactcgctttaggaacaattattattttagccttagagtttacaaatatgaaaacccttggagctttacctttaccagataaaattttagccagtttcttccaatcaacaaccttgagaactgctggttttgccactgtcgatattggtgcattacatgtttctacaaaattaattatgtcaatgttcatgtttattggtgggtcacctgcaggaacagctgggggaattaaaacagttactttcgtcatgatgcttttatatgtgcatgcgcttgttcaagggagtgatcgtattaaaatcatgaagcgttctatttctgatcaagttgttaaacgtgctttaactattgctatggtgagtttctttatttgtgtcacaggtttatttgttttagcaattagtgagaagttaaattttatagatttggtttttgaagtattttcagcctttgcgacagttggattaacggcaggagtgacaccaatgttgacaagtgtcggaaaagttgtcattattatattgatgtatattggtcgtattggtccaataacaatgattttaatttttgcaaaacgatataatcaaatgaaagggaaagacatcgtctatccacaagctgatgtcttaataggttagaagtatgaaaaatagacaatatgttgttttaggtttaggagtctttgggtcaaccattaccaaaacattatcacaatttggttgtgaagttttagccattgataaagatcctgaatgtgttcaaagggtttctgaatttgcaaccaaagcagttattggtgacattactgatcaacaattcttaattgatttaggggttgaagaatttgatgttggaattgtagcgattgggaatcacttagaagaaagtttattaggagttttaaatttaaaggaaattggtgttccttatattatcgctaaagctaaaaacaaacgttttaaagttgtcttagaaaaaattggtgctgatcgtgtttgtcgtccggaaaaggaaatgggagaaagagttgcacgttcattacttagaaagaatattactgacttaattgaattggatgataattatagtgttgttgaaatgaaagttccacaagcttgggttggacattcattacaaggattaaatctaagaaaaaattatggaattaatatcttaggtattcgtgatgaaaagacgcataaacttgaattatcagttgatcctcaatattcaattcgtatggatgatcatttcttgatgattgctgaaactgaaacaattgaaaaatttgattacttagttgaagtataaaaaataggagagttcatagagagctctcctattttttccctttggttggttgtgggacaacgatttcttctaatgttggataatcataaaaatgagtttgacgagttactgtatcataaatagcgtaggttctatgtcttgggtaatttcttggtaaggcaagactaccaggattgataagggtcacatcatcgacttcattaaagtaaggaatatgggtatgaccaaaacaaaaaacattggcaggataatctttacgtaagtttaaaaactctaatggttcataagaaagatgattgatatgtccatgagtaatataaaataaggttccatcaatttcaaattgaagggtttgttcaagattggcaaaatcattattaccacgacaaatataaagtggtttaggagcatgaaatgttttgggatcaaagcctaaaaatatatctccacaatgaataattgcatcatatcctttaactgtattaaaaaattcttcaaggtcatgctcacgtagaaaatgagtatcagaaatgattaatatttgactcatattgaacctccttatgttcttttttatgaatttgtgttactattattataataacagataaaacaaaggatggtaagagaaatgtgtgctttgatagaatttaaaaatatcattaaaagttatacaatgggggatattacaattcacgctagtgatggtgtgaattttgaagtgaataaaggggaatttgttgtaattgttggagcttctggagctggtaagacaaccatcttgaatttacttggagggatggattctccaaccagtggaacgattttagtggatggacaaaatattgccttatatgatgagaaacaattaacagaatatcgtcgtgatgatattggatttgtctttcagttttataatttaattcaaaatctaacagctttagaaaatgttgaattggcttctcaaatatctaaaaatccattagatgcaagacatgttttagaaagagttggtttatctgagcgtatggctaactttcctgctcaaatgtcaggtggggaacagcaacgtgtagcaattgctcgagctattgctaaaaatcctaagcttttattatgtgatgagccaactggcgcattggattatcaaacggggaagtcaattttaggtttacttcgtgagatgtgcgaaacatatcagatgacagttattgtgattacacataactctgcattggcacctatggcagatcgtgttatccatttaagaaacgggaaagtttatggcgtagaacttaatgaaaatcctaaaccaatcgaggaaattgaatggtaaagcaaaagaaatcaatgtattggagaaatttatggaaatctatttttgcttctaaagcacgatttttatcaattttttcaattgtttttctcggtgctgctttttttgccggattaagaaatacgccaggaacaatgaccaaaacaatggatgcctatttggataaacataattattctgatttaacttatattgcctcattaggtttttcgcaggatgatattgctgcgattaaagatattgaaggaattgataagattgaatatggttatcagtttgatgctttgaaaaagactcatgatcaattagaaggggttaaggtttatacgagtcaaacatttgatacaaagatgattaatcatcctgatttaatagaaggacgttttcctaaacaaagtgatgaatgtgttattgataatgaacttgcaaaatcaggaacaaagattggtcaaaaaattgatatttctaataaacaaggagaaaaatcttttactgttgtaggaattattaatgatgtgagatatattgctaaaactgatcggggaaccaattcattaggggatggaaccaattctggatttattgaaattttaaatacagataatgcttttttagcaatgcctgatgaactttatgatttaagagatgaaggtgttttatacaatcaaatctcaattactgttaagggggcaaagaaggaaaatgtctttacgcaagcttatgatgattttattgaaacattaaatacgaaagtcaaaagtacattatctttacgtatgagtaatctttatgaaaagcttacacgtgatgcacaaaagaagctagatgatgcaaaaaaagaatatgataaaggttataaaacttatacagagtcgaagaatacttttgatagtaaaattttagaagcaaaaattcaattgattaatgcaaaaattactttagcagataaagaaatggaatatatcaaagctcaatcaatggcttcatcacaagcccaggatatgcttgataccatgaaaaaaacaagtgatgaattaaagaagaacttagaagatttgaaaaaacaattagaaggataccaagaaaatcctcctgaaaaaattcctcatgaagttattgatgaagtgaataaaacaattaaagaaatacaagatgttcaaacatcattaaaaacagctacttcatcaattgatggaatgtttcaattaaatgaagcatctattcaaatccaaaaagcaaagcttcaaattcagcaaaatgaaaacaaattagctttagaagaattaaaaaccaatcaacaattaactcaagcaaaagataaattagataaagctcatagtcaaattagtgaagctcaagataaagtcaatgaaattcctaaaggaaaactttatactttaacaaatcatcaaaatgcaggattagtgaattacgaatcaaataaagattcaatctcatcaattgctgatatctttcctttaatgttctttttggtctcagcccttgtctcattaacaacaatgacaagaatggtagaagaacaaagaagccaaagtggaacattaagagctttaggttattcaaaatgggatgtaattaagcaatatattgtctatgttatttttgcaacattttttgcctgtgctttaggaattgttttaggaacacaattctttccacgtattatttattatttatataatttaatgttattccaagttgatgctaagacattgatttattcaagtcaggctgttgcctttcaaactttctttatttctgtctttgtcacaatggcagcaacattatttgtttgtatgagtgaactgaatttaatgccagcagttctgatgcgaccaaaggcaccaaaattaggaaaaagaattgttttagaaagaataacatttatttggaaacgtttatcttttaatcaaaaagtgacaatgcgtaatatctttagatataaaaaacgtttctttatgtcaattattgggattgctggatgtactgctttgattattactggttttggtgttaagcattcagtttcagcagttgttgataaacagtatcatgatgttttaaaatatgatgctttagttcgtttagatgactctatttcaaccagtgaagctaaaaaatatcaaaagaatcttttacaaagagatgctgtcaataatgttgaatatgtcttgaatcaaagtattgatattttaaagaataaagaggatttatatggaacattggtggtttatcaatcaatggaaaatatttctaattttgtaaactttaaagactataaaacagggaaaaaacttgttttggatgatgatggggttatcctatcagcaaaaacagcggaattattagatgttgaagtcaatgatacgatggatatagaattatcagggacaaagtataatgtaaagatttctggtatcatggaaaattatttcatgaattatgtctatatgtcacaaaatctttatgagagtgtaacagcacaagatttaaaagtaaataatgcttttttaacaatgaagaaaatggatcaatcttataaaacaagtttagaaaaatatatgaaagaaaagaactatggaaatctttcttatatcaataacattggtgaagaatttgataatcaagttcaaagtgttgatttggtgattattatcttaattgtatgtgcaggagccttgaactttattgtcttatacaatttaaccaatattaatattcaagaacgtaaaagcgaaatagcaacgattaaggtcttaggctttaggcgtaaagaagtctatgattatatctttagagaaaatgttattttatcgattattggttcattgttaggaacagtttttggatatttattgcatcgttttattattcgtacagttgaactggatgtgacaatgtttgttcgttcattgaactttacaagttatatttttgcaattattattacattaggatttactttatttattgattttgtgatgcgcagagttttaaatcgtgtcaatatggtcgaatctttaaagagtattgaatagaaaagatggtcttgattagtgaatatcaagaccatctatttttttgatttgaaggcgatcaatataggcttttaataaaaatgatagataaattaaagcaattagacaattggtatcattaatcaaatgtaaagaagcaaagaagggatgaatatattgaataaagcatagacttaaaaaacaccacattagaaaataaaacaaacaaatacgtccttgataatgaaaatgatgttttgaataatcccagcattttgtttgaaagcttttttcaatataatgacttgcaagatattctaacaaagtcatagctataccaccaatgaaaaaagaaagtaagaaggaatttttaagataaggggataaaacaataagtaaacatgcaccaaaaccataaagtggaataaaaggacctttgaatagtcccgaagaaatgacacgacgagataaaagcgagacatagatagattccatcagataacctaaaaaacaataaatcgaaaaataaataatcatatgattctcctttttgtacactctatgaatttcttaagaaattatgactaaatttgacaaattcggctataatacagctataaaataatatttatgaaaaaatatacaaaaaaagttaaataaaaaagtattgatttaatcgatataatttgaatttcttaagaatttcttaagaaagttgtggactttttgtgaacgttgtcttataatactaagtgggtatattattgaaaggaggaaacgaatggatagtaatattaaggcgaacttattagaaaatttgcaagaacatgttattaatcgtaaagccatgtttattccaatgttgtttgtttcaacatttggtttagttggttatgccgctgttgataaagaagctcctgttattgattctaataaagtagaggttctttatggaacaaaacttgataaaagtatgtttgctatttctgataatcgtgataccctagacagtattgatgtcaaaatcaatgataagtcatatgatccttatcagttgggtatatataacgttgaagtaagtgcaactgacatgttctctaatacgcaatcaaaggttgttcaagttgaagttgttgataaaactgctccagaattgaagcctgtcggaaagagtaatggatatgttgtaaatgttgaagttaatggcagcaaagatattacaaaatacattaaagcaacagataatgttgatggtgatgttactccgttcatcgaaacaaacaagaagcttgatacgtctcgtttagggactcaaacaattcaattgaatgtttctgatgcagctggaaatcaaacccaaaagacatttgagttctatgtatctgatacaattgcaccaaagattcaacataaaaaagggtcaacagtaactgttgactatggttcaaagtttagctattcagattatgttggtattactgataactttgataagaaggtaacatctattaaagtagatggtaaagtcgatacaaagaaaattggtaagacaacattgaatatcactgctgtggattcatctggtaatgaatctaaggcaaaattaaatgtagaggttaaagatattagtgctccaaaattaagcttatctaagagctcagttacaattacaaaaggtaagagtttctcagctaagaaatatttggaaagtgccattgataacaaagatggaaatttaacttcaaaagtaaaaattagtagttctgtcaatacagacaaagctggtaagtatacagtcaaatataccgtcgctgatgctgctggcaacaaaacaactaagacattaagtgtcaaagtagaaaatccaattcctactcatgcaggtgttgcatctagtgcattaagccgagttggaagtagatatgtgactggtggtaatggaccaagagcgttcgattgttctggcttaacacaatgggcttatagacaaaatggaatttctattccaagaacagctgctgctcaatatggagcaacatctcgtgtgtctaagtcaagtttaaaagcaggagacttagttttctttagaggaacaacaggtcgtggtggaattactcacgtaggtatctatgttggaggtggacgtttcgttcatgctggaacatctcgtacaggtgttacaactgctaatttaaatagttcttactggtcaagccattgggctggcggtggaagaaaatagcaaaccactaaacggatagatgaatttctatccgttttcttttgcttattgctagaatgattgaaaaaagcaggggatgacgatataatgaagaaaaagaggtggagataatgaaaattggaagtagtcaatttatgaaacaatatgatgaatatctcttaaatcatggttatcaaattaatgaattggttgataaagcaagtgattgtttaattaaacatatgcatggacaacgttattgtctattatgtggtccaggtaataatggggctgatggattatctttagcaattaaattatttttacaggggaaacaagtgactgtttatatttttgaagatcaaaatcatctctcacaagcaaatcgttattatttagatcaatgttatgttttgaatttagaagtcattttattaaatgaagatatcctagatgaagtgatattgcatatgaaagattgtgatattatagtggatgccatgtttgggaatggattgaatagttcaccacgtggtttatatcagatggttattgaacaaatcaatcaattatatgatcaggaaattattgctgttgatattcctacaggattaaattgtgataatggaaaaccttaccagagtgttgtctgtgcgacacagacaattactttaacagccttaaaaaatggtttcttaaatcctgatagtacatcttttactggtcaggtgattgttgaagaattagatgttgaggatgtgagtgaagaagttggtctatatcaattagctgatcaaaaaatgatgtgttcattattaaaagaaagacgttttgatggacataaaggtgattatggacgaacattactgataacggggtgtcatgaatataaaggagcttctttattgagtgccaaaagctgtgtctatagtggaagtggggttgttacggttatgagtgaacaagctgtgattgatgctttaactgtctattgtcctgaagtgacaacgcaattaagaccagccgttatgcgtaaagaagatttcttaaaatatcaagctattcttattggctgtggacttggtcaaagcattgatagttatcgtcacgtgattgatgttttttctatgtcacatcaaccattggttgttgatgcagatgctttaactattttatcaagtaatttagatttattaaaaaatcaggaacgggatattattttaacccctcatatgggagaatttagacgtttatatgaatttgatgaacattctgatatgttgtttgtggctagaaattttgctttaaagcatcatgttattttggttttaaaaggtccttatacgattgttacggatggtcaagaatcttatcgtatttttgctgggaataaagcgatggcaagtgggggtatgggggatactttagcgggtattattaccagtctcttagggcaaggttatagtggattacaggcggctatgttaggggtttatattcatggtcgtgcaggtgattgtttagctaatgatgcttatacaatcattccttccaagcttattgatgtgattcctcaaacaatgttacaaatgatctatgaaaaaaatgacttatcttaaagatagtcattttttttgataactttcaaatgctccattgtgggtctttttcgctatgtataaagcttgatcagcctttttcgcaagctcactataattatcaccatgcttaacaacaatggctccagatgaaatagaaataactggcatatttcttcttttggcttctttttcaattgaatcattgatatcctgaataatctttttagcgacatgataatcatcaatgttggcaataaatatagcaaattcatcaccatgtaaacgagatgccaagtcaattgtacgaatacggccaataatcatttgcgcacaaagctttatcacttcatcaccaatcatatgtccataagtatcattaacatatttaaaacgatcaccatcaatcattattaaaatcccacaatcctcatcactcatcgtatgaatttgattaatcactgatttacggaacgatttttcattcatcattcctgtgagttcatcaatcgcagccgctttttgagcggcacttaaagcaatctctaaacgcttttgcgtttgccctaattcaacataggctgcctttaattcgcgattctttgcttctttacttattctatttaaaatataaatacaaacaaattctaatatcagcatcggaattaaccagattgacattgtttcttgtaacaatgtcaataggggaatagacattaaaatatgataatcatcaccttttaataagtaattataataataagtatgattgaatttgtaaagctgagcttgttgaggtttttttgttaaatgctgataatcttcatgaaactcttgttggaagttataaaaagattgagctgaatccatctgttcctttaatttttcaatctcctcatcaacagttgttttcgctaatgtttcttttacatcatcaatcacttgtttatcctcttgtaatgaagcatttaaatttccccctaaatatttttcttcactacttccaataattgttccagctttatcaaaaatcatgatttgttcattatcataacgacttaaagtatgaacaatcttttgaatatttcccattttaatatcataggcaaagacggtttttccatcactttgaagttgtgaaatggtagaaagtacataatgattggcataactcatataaggaggggtaaaaacaatcttacctttttcttttattgcattcttataccaaggacgttctttggcattataacctgtattaacgtattgttcataaggcgtatcccagctataaagataacgatcttgatagtacatgtataaaccatcaaaggtctctccttcaatttgtaacatttttttatcaatgctttttaaatacttccaaatctcatcggggtgaggatgatcttggatttcatttgttaacatttgagaaaacaattgaaatgaatgtgtataatgactcatggtatctttaacctcatcttgatactcttgactatgcacatcaaaaatcttttgtattgcttgtgtttcttgatggtatacaaatatcattgcaatgatattaacaatgataaagatgctaatatgccaacgcttgttcttcataatcttttcctccagactctatatctatcattatattatcacaaaaatatcacataatgtagaaaatgtttataaccaaataaaaaaagtaagcgaacttacttttgtggttgttttaatttgattaaggtaatattacgataatttgttttttcttttcgatatgaaaagaataaatcattgttttcaattgtacagtatggagaaatcgttatatttgtctgaagaatccctaataattctagttgttttttaatcaaacctttactattaagcaaataagcaccatcttcttttttagtataaaaagaagatgtatcaaaagacatttgtttaaccaaatcaataatatcatccttggcttcaaaatttctttgttctatggaaggaccaatataagcataaatgtgttgacaatcacaatgctcattttcaatcaaatgctttgtcactttcccaacaatttcaccaaccgttcctttccatcccgaatgaattgcagcgacgattttttgatcacgacaataaaggagaactggacaacaatctgcatgaaaagtccataaccataactcaggatctctggtatacatggcatcataattatcaaaggcatcttcccttgataacattcctctaccaccatcatttgctgttacttctataaaatttgttgtatgtttttgaaaagtagcgaccatatgatttaaatcagtatttaataattgagccagtgcttgacgatttttgagaaccaaagcatcatcatccccatgataactcatattcataggctgatgattttcatcataagcacatgttgtataggcttcgatttcatcgaagcagctccaaggtattaatttcataaaactcctttcatttgcccttacacttcttagattgtttcatactatatatcgaaggagggaaaaatatgtttaatcaatcttgtggaaatcaacaaggatgttcatgtcagatgaattcaatgatgtctgattgtggtatggataatgcccaaatggccggtggctttaatggttgccctagaccacaaccattagttgcaccaagacgtgtttgtgtttcaaaccaagttacacgtgttcctcaaccagttatttgtccaattgaatgtcgtcgtgtgaaccattgtatgtattttccagtattcattcctcaatatgaacacacatttgtgaatgcagctaacaatcaactttattaacttcttgtaaaaagctctcatcaggatcaatgtaaattgttgaataatgagagagtatgactttccctggttttgttccttgaggttttttcaaagttctaatctttgtataattcacaggaacggatgagctgtgcttacctttagaaaagtaagctgccatttgactcgcaagacgaattgtatattcatctaaatcttcgctatgcacaacgacatggcttcctggcatatctttgacatggaaccacatatcattttttgaagccattttaaaggtaagataatcattttgcagattattcttgcctacataaattgaaatattatcttttgtaagatatgtttcaatatgtaatttcttaggacgatgaacttgtttgtttttcttcttttttaaataccctagattttctaattcttctttcatttctaaggcatcatagtaagatgcattgtccatcaaagtaattaaagtatcaaaataatgaatttcttctttcgttaaagcaatctgttcttcaagatgaactcgagcattttttgccttttgatattttgcataatacttatttgcatttgtttttccatcatagcgttcatcaagttcaattgtcatcattgttccatcataataattttcaactgtgacttctttttgacctttttgaatacaatgaagattagcaaataataaatcacctttaatacgatattcatcactattttgtgaatcaaacaaagtcttttctaatttattcaacttattaatatttctttgatattcattttgaataaatcttgctaaatcagatgtttgttgtttaatacgatccttttgatcaatcaaatgataatgttcatccaatccttcaaataaaggataagcttgatattcacattgtaaatgagttaatggaataatatgaaaatattccttttgatcaagtttatgaatatataaagtatttgattgacgtatttcatttaaaacagcttgaaaatcttgaccatgatcaagacgatagagaacttcacgagatagttcaggggaaaaaccttgataaatctttgtgaggttatctgttggttgaaattcactttcaaatggattgcgtttatctaacaaaggaggaagctgataggttgctcctggctgtaagatacgagcactcattgcgggagaaacgcgttttaagcaatcaatgatttttaaatcatcataagttaaaatcacattagaatgttttcccatgatttcaatatataaatgaagtttgactgtatctttaaattcatttgttgaaatcaatgagaaatgaataatacgatctaatccaacttgttcaatagattcaatgaaagctccttctaaatgttttctaaaaagcatagttaaagcattaggagaaggtggtgttggataagaaagtgatgtcaattggagtcttgcataaactggatgaattgacatcaaaagttttgaatttgtgccttgagcacgaatatgaaacaaaagttcatattgagatatctgatatatcttgttaattttacctctcgttagttgtgattgtagattttcaacaactcgagaaagcattattccgtcatttgccataatttatcaccgataaatagtataacatatttcaaaaagaattgacattaaagttgtgttcatgtaacattgtttcaaaaggtggtggaatgtgtgagtaaagggttgttaattattttaagtggaccaagtggagtaggaaaaggaactgtcagacaagagctatttaaagatgagacattaaatttggcatattctatttcaatgacgacaagaaagcctcgtcctaatgaaaaagagggtgtagattacttttttgtgagtgaaaaggaatttgaagacaagattgaaaaaggtgagttgctagaatatgcgaagtttgttggaaattactatggaacacctcgcttttatgttgatgaattactaaaagaggggaaaaatgttgtcttagaaattgaagttcaaggagctttacaagttatggcaaaatgtcctgatgctttaacaattttcttagtacctccttcatttgaagaattagaacgtcgtattcgtggacgtcgtactgaagctgaagaagtggttaaagaaagattggataaagctcgtaaagaaattgccacaaaagatgaatataaatatgtggtagaaaatgatgatgttttattggctaaggaaaaaattgcgcaaattattaaagaaaatgcctaggatacgtttgtatcctttttctattcaaagattcttttttatgataaaataaagcaaatggtggtgaggatatgtatattgtgagtgtattggttgaacatcctgttcaatcgttagatatgacttttgattatttaagtcatgaatctttattaaaaggggttcgtgtctttgtacgttttggttatcaaaagattattggctatgttgaggatgtgaatgaaacagctttatcaaaaacagaattagaacaacaggctggttttcattatcaatatattcaagaagtcattgatcaagaacctttattaaatgaagaattacaacaattagccttacaattatctaaacttacattatctccacgaattgcttgtttacaagctatgttaccatcacaattaaaaccaagtaccaaccattcagttggtttaaaattacaaacagttgcttgttttttacaagaaggaaaagccaaaaccaaaaaacagcaagaatgtttagattatcttaaaacacattcacctacccccatcaaagatattccctatagtaaaaatatattagatcaattggttaaacaaggattgattgaatatcaaaaacaagaagtttatcgtaaaccccttgatttttttcaaacaaccaatcaagatatcattttaacaaatgatcaacaaaaagtggttgatggaattattgcgcatcctaaaagggttgccttattacatggggtcactggttcaggaaaaacagaagtgtatttagctttagcaagacattttttaaataaacaaaaaagtgttatgatgttagttcctgaaatttcattaaccccaatgatggtaaaagtctttaaagagcgttttggggaacaagtagcaattttacattcgcgtttatcacaaggtgaaaaatatgatgaatatcgtcgcattaaacgtcaggaagttaagattgttgtgggggcccgttcagcagtttttgctccattagaaaatataggcttgattattttggatgaagaacatgatgtcagctataaacaggaatctaaaccacgttatctgacttcacaaattgctaaaattcgtgctcaaacacatcaggcaactgtagttttagggagtgcaacaccttcactagagagctattcaagggctttaaagggcgtttatgatttatatgaattaaaaaatcgtatcaatcagatgccattaccaacagttgaaattgttgatatggtgaatgaaacaagacaaagaaattattctttattttcaagacgtatgaaagaacagattcaagctacaattgatcgtcatgaacaagttatattgttgcttaataaaagaggctatgcgacttatttacaatgtcaagattgtggagaagtcgttaaatgtccacattgtgatgtaacactgacttatcataaagatgaacatcagttaaaatgtcattattgtgaatatgtacagagttatccacagagttgtgcacattgtggttctacgcattttaagactgtgggttatgggacacaaaagattgaagaagaacttgaaaagacatttttaaatgctaaggttattcgttatgatgttgatacaactaaaaataagaatagtcattttcagttacttgaacaatttaaaaaacaaaaagctaatattttattaggaacacaaatgatcgcaaagggcttagattttgaaaatgtcacttttgttggtgttttaaatgccgacttaagtttaaatgttccagattttcgtgccagtgaaagaacttttcagcttttatgtcaagtcgcaggaagaagtgggcgtggctcaaaggcaggaacagtcttgattcaaacatacaaccctgaacattatgcaattacttgtgcttcacatcatgattatcaggctttctaccaacaagagatgttatatcgtcaaaaagcattatatccaccatattgtcatatggtaagtattttgattcaatcaaagcatgaggatattctacagatagccggtcaggatatcaaaaattatttgttagcacatacgcatcaatgtaaaatcttaggacctgctcatagtgtgatttataagatgcaagatctttatcgtcaaagaatcttaattaaatttgtacagggaaaagatgtttatgaggcgttaaaaacaatgaatgatttttataataaaaaacaaaaaggaaaggtaacagtgatatgtgattttaatccatattcacaaatataaagttatggatagattaatagcgttagaaatattattaaaatacaaacaagagaaaagttatttaaatttaactatcaattcatattttcaaaaatatgaattatcacgttcacaaaaggattttattacaagagttgtttatggaacagtacaaaatcagatttatttagaatatgttttaaaaccacatttaaaaacaagggttaaaagctatgaaaagatgttattgttgatgagtctttatcaacatttaatgatggatgctattcctgattatgcaattattaatgaagcggttaatttagcaaagaagaaaaaaggcataagaacatcgcaatttatcaatgctgttttaaaacaagcatttttaaatcaaccatcattagaagaactttcaaaagaagaacgtttatcaattgagacaagtcatcctttatggatggttaagatgctttgtaaacaatatggttattcaacaacccaaaagatctgtcaggctaataatgagccaccattaaaatgtgcaagagtcaataccttacttacttcacaggacgaattattaaaagatgaattatggcaaaaagggaagttagctaaggatgctttgtattatcaaggtggaaatattgcttatacaaaggaatttcaagaaggacttgtaacgattcaagatgaatcaagtcaaatggttgctccatatttatcgcctaagccaggtgattatgtgttggatatgtgtgccgccccaggaagtaaaacaactcatttggcagctttaatgcataatcaaggaaagattgatgcttatgatttatatgaacataaaattcctttgattcaacaacaattaaccagattacaggtttctattgttgatgtgaaggcctatgattcaacaaagttaatagagctttatccaccattaacttttgataagatcatgttagatgctccttgtagtggactaggagtacttgccagaaagccggaaatcaagtatcatgagagcaatgcaatggatgaaatcattcaaatccaacaaaaattattagaaaatgcatatcctttattgaaaaatggtggtaatattgtatatagtacttgtacaattaataaaaaagaaaatgaaaaacaaattcaggcatttataaaacgtcatcctgatatgaaagtcattaaggaacaaacgattttaccttttgaatatcatagtgatggattttatatgtgtctattagaaaaggaatgaaatgatgaaatcaatttatgattatacacaagaacaactgattgaagaatttttaaatttaggtgaaaagaaatttagagcaactcaagtttttgaatggatatatcgaaaggatgttcaagactttgatttaatgagtaatttatctttagatttaagagaaaaactaaaagaacatttttccattggacctttatcaattgttgagaaacaagtttctcaagatggaacaactaaatatttattatcacttgctgatgggggatacattgaaacagttttaatgattcatgattatggtcgtagtttatgtgtgacaagtcagctaggatgtaatatggggtgtcgtttttgtgccagtggacttttaaagaaacaaagaaatttaactgctggagaaatggttaatcaaatcttaactgtcatgaatgatacaaaagaaagagtaagtcatgttgtcgtgatgggaaccggtgaaccgtttgataattatgattatgtgatgaattttattcgtattattaatcatcctaagggcttggctattggggcaagacatttaacaatttcaacatgtggattatgcgataagattgaaatgtatgcacatgaaggaattcaaagtaatttagcggtttctttacatgctcctaatgatgagattcgtgatgaattgatgccaattaataaaacttatccaatggataaattaagggaatctttgcaatactatatacaaaaaacaaatcgtcgtgtgacttttgaatatattcttttaaagggaatcaatgatgatattacgcatgcaagacaacttgctcattatatgcgaggactgaatgcttatgtcaatttaattccttataatgctgttgatgagcatggacttcaacaatcatcaccatatgatgttgaaatttttaagaatgaattgttacgtttaaaaattaatgtaactttaagaaaagaacacgggcgtgatatagatggagcttgcggacaattacgtgcgaagaaggtaggggaataaaagtggaaattgtagctatgagtgatgtgggaaatgtaaggacaattaatcaggattatgttcgttattatcaaaagaatgaacatgagtcactcgttgttttatgtgatggaatgggtggtcataatgctggtgaaattgcttctcaaatggtcggtgatgcaattgttgaacaatacgttaatcatgctttatttgaggatgaaaagatgattcatgattggatgttagaggttgtcaatcatgctcattggcttgttaaaaacaagagtttagagtctcctgatttagagggaatgggaacaactgttgttttagcattgtttaaagatgagtatgtttatgtttctcatgtgggagattctcgggcttatttataccgtcatcatcaattgattcaattgacaagggatgatacattggttaatgttttggttgattctggaacaatttctaaggatgaagcatttaatcatccacaaaagaatattttgttacaggcggtaggagtaagtgaacatttagaagtatcttatacaagtgaaaatgtaaaagatgctttattgttagtttgttctgatggattgtataattctttatttgattcacaaattattgaaattctacaatctgatattcatttagaagaaaaaggtaaacagctgatggaagctgcgaatactttcggtggtaaggataacataggatttgcactaatattaaatgaaggagttgtcaataatgagtcagataaataaaacaattgctggacgttatatattaaaagagttaattggacaaggtggaatggctgatgtctatttagctgaagataaaattttagaaagaacagtagctgtaaagattatgcgttcttctttaacaggggatcctgtttatgttacacgttttcatcgtgaagcacgtgctgcagcttctttatcacatcgtaatattgtgaagatttatgatgtcggagatgaagatgatgattattatattgttatggaatatgtaccaggacagactttaaaagaattgattcataagcgaggagcattacattttgttgaagctgttgatattatgaaacaagttgtcagtgcaacggctaaagcacattctttagggattgttcatcgtgatttaaagccacaaaatattatggtaacagatagtggtgttgtgaaaattggtgattttgggattgcttctatacaatcattatcacaagttacacaaactgatacaattatgggttcattacactatttggcaccagaaattgcccgtggggaaaaagcaacaccacagagtgatatttatgctttaggaattgttttttatgaattattacgtggggaagttccttttaatggtgaatcaccagtgaatattgcattaaaacatatgcgtgatgaaattccatcagttcgccaatttaatccatcaattcctcaatcagtcgaaaatattattattaaagcaactgctaaaaatataaaagatcgatatgctagtgcaaatgagatgtttgaagatttagatacttgtttattacgtgatgatgaagaaaagcttgttttcacatatgatgaaccacaagatgaaccaacaattgttgcagaagataaagacttttttacacaaacacaaacacaaaatcatattccaattgtggaagaagaacaagtagaagaaaagaaaggaaataaaaagaaaatagctattatttctggttgtgttgttggagcattacttatctttggtttggtttatttcttctttttaagaccagctagtacatttgaaatgcctaatgttattaatatgactgaacaacaggctattgatatgctagaaagttatgatttaaaagttgatacaaaacaaaccaaacatgaattaagtgatactgtggatgaaggcaatgtaacagctactgatcctgttgaacgttcagccgtcaaaaaaggtgatacagttattttaacagtatcttcaggtaaatatattgtgattgataattatgttggacgtacatttgatgatgttgaagcagaattaaagaaattaaatattactgtgaaaaaagaagaagttacaagtgaagaagataaaggaaaaatcttggaacaatctttacctcaaggtgaaaagattgatcctaatgcaacgcaaaagacaattactttaactgtttcaaaaggctattctgtaacagtacctaatgtttatggacaagatatcaataaagcaaaagatattttagaaaaagaaggatttaaagttgttttaaaaccaatcgatccaccaacaactgttgaagaaatcaaaacaatgaagattaatgttgtagtacgtcaatcacttgatgcctttacagttatctataagaaaggtgaaacaattaccttagagtattataatcataagcctgaagttccaactgaacctactgaaccaacaactccaggcaatggaactgatacaaatcaaggtgggggaggaacaactccctcaaccaattaataaaagaggtggataaatgcatagtggacaaattataaaagccttatctggcttttattatgttgaagaagatggtgtgatttatcaatgtaaggcaagtggtaagtttagaaaaaatgatcaaaaaccattagtaggagatttttgtgagttttctattgaaaacgaaaccgaaggttatattcgtcaattacaagtgcgtcgtaacgaattagtgagaccacctatttgcaacattgatcaagcattacttgttttttcagcaaaagaaccagatatgaatacacttttacttgatcgtttccttgttttaattgaacatttgcatattgatccgattatttgtatttcaaaaatggatcttgtagataatgatgaaattaaaaatatgatggaaccttatcaaaaagcaggatatcatgtttattatttaagttctaaagaaaatcatgggattgaagaattaaaacatttatttcaagataaagtgactgtcattactggtcaaagtggggttggaaaatcaagtttattaaatgctttagatatacatttaaatattgatacaaatgagatttctaaagcattaggtagaggaaaacatacgacaagacatgttgaattattaaaaatgtatggtgggtatgttgctgatacacctggtttttcatcactagaattaaatatggaacccattgatttagctaagagctttcatgattttgaagaactttcgcaaggatgtaagtttagaggttgtttacatgatagtgaaccaggatgtttggttaaggaagctattgaaaatggtcaaatttctaaagaaagatatgaacattatttgatgtttttaaaagaaagtaaattgttaaaggagagaaaatatggttaaagttgccccttcagttttatcagctaattttgctgaattaaagaaagatttggattctattcaaaaatatggtgctgattggattcattatgatgttatggatggacattttgttccaaatatttcttttggatatagtattttagcagatgttaaaaaagtaagtgatttatatttagatgttcatttaatgattagtgatcctaaaaaatatgttgatgaatttattaaggctggtgctgatttaattacttttcatattgaagcaatggaaagtgaagaaaagacaagagaattaattgaatatattcatcaacataataaacatgttggtataagtattaaacctgcaacaccagtaagtacaattgaaaaatatttaaatgatcttgatttggttttggttatgagtgttgaacctggatttggtggtcaatcttttcaagatatggcgattgctaagattaaagaattaaaagataaacgtcaagatgctcattatcttattgaagttgatggtggaattaatgcacaaactggaaaactttgtaaagatgctggtgctgatgttttagtcgctggaagttatgtttttaatgctgataatcgtcaagcggcaattgattcattaaaatgaaaataggaatttatggtagtgtctatgctggcaatgttaaagataaaagtatagattatattggtgttgatcaaggtatcattcatttaatcaaacaaaatattaagcctataattgcaattggagatatggattcaattgaagataaagaccttttaaaaacattaaaagttgatgaatattcttgtatcaaagatgatacagatacagctttagctttgcgctatgcttttcagcaaggctatgatgttattgatttatatggtgttacacaaaaaagaatggatcattttttagctgtactatgtttgcttgaaaaatatcaagataaacaattaacaatctatgacgagttgaataagatttatgttttaccagctggaaaacataaaatcttaaaagatgaatattattatttttcagtctttgcttttgatgaaagtatcattactttaaaagaatgtcattatccacttgatcattatcatttaaaaagagatgatcctttgtgtgtttctaatcaaatgaataatgattatgcaattattgaaaataccaaagctattttattgatacagtcaaaatgaaagaagggttagtatgtatcaaatagttacagatggatcttgtgatttagatcaatccatcgttgaccattatgcgatgtctgtagttccattttatattacgaaagatggaaaaacacatcaaaaggaaaaagtagatatagaagtagaagaattttatcaatttatggttgatcataaagatatttttcctaaaacatcaatgccatcagtagaagattatatagatgtttttactcctattcttaaatcaggtgaagatattatttgtatctgtattacaacaaaattttccggctcttataatagtgccaatacagctaaacagatgttggaagatgaatttccccaacgaaaaatgacagttattgatgcaacagtaaatactgttttacaaggtttactggtcattgaagcatgtgaaatgaaaaaagcaaactatacatatgatgaaacagtcacaagaatagaagaaatcaaatcaacgggaagaatcttttttaccgttggaaactttgagtatttgattcatggtggacgcattggtaaagttgctggtgttgcggctaagacacttggaattaatccgttgattgttttacgtgatggagaaatctttgcttctggagtaacacgtggtagagaaaaatcaaaacgtaaaatcattgagaatacgattaaacattttcatgaaaatcatcttgatccttcaacttatgctttttgtgttggctatggctatgacaaacaagagggagaaaaatttaaagaggatctattgatatcattgaaagaagcctttccacattttgatgaaccaatattattacaacaaattggtgcaactattggtgttcatactggaccttatccaataggtgtaggcattatacaaaaatataaataaaaaaagcaatcgcgaaaaagagaatactcttatttgcggttgcttttttgtaaagtggttgaagatgataaaccataatgtaaaacataatcttctaaagtccaattattttcataaatgattttagcagctttttgaccaacatagcgaaaatgccatggttcattggttgttccggttatatgagatttattttgtggataacgtaagatataaccataatgatgagcattttcaataacccacttgtattcgggcgtatcaccaaaaaaacgccactgaccattaataacactttgacttgttaaatcaacgcttaaacctaattgatgttcactggaaccaggtattgcaactaaaccagccgctgttacagcatcatatttttgaaaataatcatcatagatagctttttgttgttgaaaagaacgataaccactattaatcacaagatggagattttcttttaaagcatcttgatacattttttctaaggcttgaccagcttcttttcgtaattgtttgttttcacaatcttttgcaataggaatattcacatcttttaaatcgttaggaatatatgaagaaggaagttgaaatccttttttgattaataaagtgagactttctggttcattaacaatataagtttgattgactttttgtggagaggatataaaaggataggaaatggataaaacagcatcaagtggtttctttttggattggatatacttatctaaatcctgataaatgacacctttaatagagagatattctttggttttatgataaggtaattcttgttgggtaagataagcaaagtcttgtaaagaagcattttgcatcatttgtaagagtatgtttttaggataacctaattcattcaatttaggctgatagagtttatagaattgatcgatatatgtgacaacatctttagcatttgtttgaggatgttgtttttgataaagagaataatctaaataatggtgttgttgagaaagagttttccatttttcaagattttcaattttatcatttttgatatatgtttgtatatcttgttcatctaattgtaaaatcatattttgttcagtaaaattatatccttttatcaataattgaatccgatttttttgaagataacctattccagctaaaataataatgaaagctaaaatgagaaaaaagacgggtgaaatatgttttttatgtgaatatggatgtttatacttttgcatttttcaaatatcctttctgtttatagaattttggtaatcttttccccatacgactgaggatctcattggaaattgtttgagcatgttcactgatttcctcaaccctaatcatatgattatgatctttaccaataatagtgaccttatcaccaattttaacatggggaatatcagtaatatcaatcatcaattgatccatgcatattctccctacaatgggggcaaagaagccatgaatcaggacgttttgatgattagataaatgtcttggataaccatccgcatagccaagaggaataacagcaattttgctgtcacgagaaaaatgatatgtacgaccataaccaattagatcacctttatgataagaatgaatatgaatgacatgggaataaagtgataagacaggatgtaaattgatttgacattgataaggagtattaagtgatgaagcaactccatacattgcaatacctaaacgaacataatcataatgatattgggggtagttaagtaaaccgtaactactttgcatatgtacttgaccgattggataatgtctttttttgagagtttcaattaaatgattaaaatgttgaaattgaagttttgtaaaggttatatcttcttttaaagagctatcagcaacacatagatgagaaaaaataccagtgatttgtaagttggataaatgataaaaggcaataatatggtcaatgtctaaacaatcttctccaagacgatgcatacctgaatctattttgatatgacattgaataggatatcccatttgatttaattgtttggcatattcaaaatctataagtgtttgagtcagttgatattgatttaataactttgctgatgtgggagatgtataacctaaaatcaaaattattccttgaatatgattttttcttaattctatagcttcatctaatgaagctacggcaaaatgatcaataccataggattttaaactttgggcaatctttatagcaccatgaccataagcatcagctttaataactgccataattgtttctttagaaacgatttgagtgatttgatcaagattataatacaaagcatctaaatcaatttctatccagcttctttgttttttgatgatatccatatatctttcctcctttttttaaaagtatcaatagataagctataagaaatgaaaaaccagttacagctaaataatgaaaaagcgattgtgaaataaagatatgctcaagatgggttagttttcccatcattcggacaacaataatcatgagaggatgaagaatataaacatataaagataaatctttatataagacaaagcgttttgatgattgaaaagttaaacaaaaggaaaagaagaaaaaggaaatgaatggtaaacttaaagtcatagcatcatgggtgataataggttgttgatgaataagaagggtttcgataaagaaaatcataaagcttactagcattaaaaagattaggacatactttttaaaatgccattgatgttgtgctaagaaagcccctaagaaaagaaagataggcgcaaataagaaaccatttctggtataatcacaaatcttaaaaagagctgtataaaaggcttcaataagcggaatttgatgaagataactataataactatcacctgctaaacctatcatataaagaatacaaacaatcataaaaatggttttttcattcaggtgttgatagagttcatacaatatcaaaagtccaatgatgacagcgggtaaataccaaagatgataaaaagttccatccatgaataaatctttaacaataacaatcggttcaaatgataatgaatgattatagatttgcacaggcagataaagcaaaatagaacatatatcaataatcaagaattgtttaataacactctttaattttgcataagttggcattccttgattaaagagaaaataagctgttgtcataaaaaagaaaggaactgctaaacgaccaaaaatacgggttattaaaaaattaagttgaggattgaaagaagtcaaaggatcagtatgaatagcaatcactaataatgatgcaattattcgcatgatatcaatgaaaggataatattttttagacatgggacctccatgcagttaaaataagtccatcaacattattccctgatacttgataaaatgcatcatccattagctgtaaagtgatagaatcatttttgattggcacataaaagagactgaaaaattgattttcaatgtgataatgaaatggattgaaaatgttataatctttgatgttattgatatattcttctagacaccaattcttttcatgcataatgtaagagtgtggaatcccaacataacgaaaatgccatggttcctctgcaatatgtgttatatcttctttatccctttgataacgttgaataaaaccataacgataagcattttcttgaaacaataaagaagttcctgttgcagggaaatggggtcttataaaatcaatatgtggtgatttaatcgcaatatcgaaggctagaccactttgatgttcactatgatgaggataggcaacatattgtttcgtaaacaattcaccattttcctttaaagatgtttgataaagtatttcttgttcttgaaaagaacgatagctactcacaagagtaagctcattatgcaaatcaactgtagaaagtaattcttttaataatgcaatgacacttctttccatcaaaaatccctgatattcataaagtttgggttgataagaaaggggatagtcatgattaataagaataagatatccacgatgaatatcttgtttatgaaatgtaacagtcctcatgttttaaccccatttctattaaaatatcaattaatttttcaaaatttatatcaattcctctcatcatttgagggaaacgactatgtgatgtaaatcctgggatagtattgacttcattgaaaacaatttcattttgaggtgttaaaaacatatcaacacgggcaaaaacttgacatcctaaagttcgatagatgattttagcagtttcttgaattttcttttccatttcttgattaatatgggctggcatatggatttttgatgtttgtaaggtatatttttcattgaagtcaaagaatccatgagaaagttcaatttcgtcaacacgtccaactatcagttcatcaaaaccaataatggcacatccaacctcaaatcctaaaatagcttcttcaatgatgacttgattatcataggtaaaagcatagcaaacagcgttttctaattcactatacgttgttattttactaataccatatgaagatcctgctttcattggtttaacaaagagagggaatgaaagctgtgtaatcaatggttctctttcttttagctccggtaatgaatttaagacaatcgattgaggaacacgaatacctgcatgttcaacaatgttatgggctttagctttattcatacaaagggcagaacttaaagtgtcacaaccaatgagtggaatttgagtcatttggataagtccttgaattgttccatcttcaccattttttccatgcagtattggaaaaatcgcatcaatataaatatgttttataccttgtttagaaatttctaaaagaccatgtttttgcggatcgggtgaaatgacaacttctaagagattgttttgccaccaagtatcctgaatgatttgttcaataggaccatcaaagtgataccattttcctaaatgagtgataccaattaaatataaatgatatttatccttattgatatgttgtaataatgaataagtcgattccagtgaaacactatattcactagaatgaccaccaaaaataattgcaatagtttttttgttcataagaaaacctcctaaattttgatacattcattgtaatctttaaaatataaagaatcataaaggactctataatttatgctaataaaaagattaagaagttataaagaaaaaagaaataaatcataagaattagcactttagacttgacagtgctaaaagtagtggtatactatagttagcacttgggtataatgagtgctaaaggagtgagagtatgaatatagaaaaatggacaatggcaatgcaggaagcgattcaaaaggcttttcaacaaaccatagcaatgtctcggcaagttgttgatattgaggatgtattattggctttattagaagatacaagtggtattttatatcgtgttcttgtaaaggctggcgtagatataaacgatttgagagcgttattggaaaataaaagagctcaaaagccaagaattgaaggggttgatgaaagtcaattaagaatttcttatgatttgaatcaattgttgatgaaggcacaaaatatcatgagtgattataaagatgaatatttaagtgttgaacacttgattattgctttatttaagactcaatcttctttaactcaagagattattcaaaaatatcaattgaaacaaagggatatagaaaagattattaaagaaatgcgaggtggaaatatggtagataatccaaatccagaaaatcaatatgaagttttaacaaaatatggacgtgatctgattcaagatgttaaagatggaaaattagatcctgtcattggacgtgatgaagaaattagacgtgtggttcaaatcttatcacgtaaaacaaaaaataacccaatcttgattggtgaaccaggggttgggaaaacagcaattgttgaaggacttgcttggcgtatttttaaaaacgatgtgcctacaagcttacagaataaaacattgtatgaacttgatttaggagccttggttgcgggtgcaaaatatcgtggtgagtttgaagaaagactaaaagcagttttaaatgaaattaaaaaatcagaagggaatattatcttatttattgatgaaattcatcaattggttggagctggtaaaacagatggcgcaatggatgcggctaacttattaaaaccaatgttagctcgtggtgaattacattgtattggtgccacaacattagatgaatatcgtttgtatattgaaaaagatgcagctttagaaagacgtttccaaaaagttcaagttgatgaaccagatactgatgatacaatcgccatcttacgtggtttaaaagatagctttgaatctcatcatggtgttcaaatcactgatactgccattattggagcagtcaatatgtcagaacgttatattactgatcgtttcttaccagataaagctattgacttaattgatgaagcttgtgcttctgttcgtatggaaattgattccttacctgaagaattagatgttattacaagagaaaagaatcgtttggaaatggaacgtatttctattgaaaaagaagataagaatgaagataatgaaaaacgtcttgatgaaatcaagagtcgtattgcatcacttgatgaacaagtgacagggttaactgataaatggaaagaagaaaagaaagctttagatcatattaaagaattaaaagatcaaaaagtgcgattagaagctttgaaagataaatatgaaacagaaggtaatttagaagaagcttctaaaatcaaatacgaaactttaccaagaattaataaagaaattgctgatttccaagctcaagaatcagatgatgccttgcttcaagaaaaagtaacagttgatactgttagtgaagtcattgctcgatggacaggaattccaatgaataaattaatggaatcagaaagggataaactcttacatcttgatgaaacattaagaaaaagagttattggacaagatgaagctattgaaaaagtatgtgatgctattttaagatcacgtgctggtatcaatgatgaaaatcgtccaattggatcatttctattcttaggacctacaggggtagggaaaacggaagttgctaagagtttagctgaacaattgtttgatagtgaaaagaacattgttcgtattgacatgagcgaatatatggaaaaattcagtgtctctcgtttacttggagcgcctccaggttatgtaggatatgaagaaggtgggcaattaagtgaagcagttagacgtgcaccttatagtattgtcttattagatgaaattgaaaaagctcatcctgaagttttcaatgttttattacaagtcttagatgatggtcgtattactgattctaagggaaatgtggttagctttaaaaatacaattatcattatgacttctaatattggttctcaatatttattacaagggaataatgctgaaacaagacatgaagtggaaatggaattgaaagctcactttaaaccagaatttttaaatcgtattgatgaaacagttatgtttaattcattagatgatcaagtggtttataagattattgataaatttattcatcaattagctcaaagattacaagatcaaaagattacaattgaagtgacacatcaagctaaagaagaaattgcaaaagaaggatttgatcctacatttggcgcaagaccattaaaacgttttattcaatcacatattgaaactttagtcgctaaagcaatgattaaaggtgatattgaaaaaggcagtcatattcaagttgattatcaaaatgatgaatttgtcattgttaacgcataagctattcttatgcgttttctttttgtctttaaagacgacctttttactttttatcttgcataaaatgtgatagaatagcgaaaggaggatgtctatgcaaagatattttattgaacaaaattgtatccatgatgatttgattcaaatcgatgcttataatcataaacatatgcaaagagtgatgcgttatcgtaatggtgatcaggttgtttgtttattgcctgatcatagaacatatctttatgagattgtaaatatcgatcaaggtctattaaaacaagtggaagaaatcaatgaggatcatgaattagatgttgatgtgacattaatttatggtttacctaaaaatgataaatttgaatttgtcttacaaaaagcaactgagttaggtgtcaaacgcattgtaccatttttaagtcaaagaagtattattaaaaccaatgcattgacatttgccaaaaagaatgaacgttatttaaagattttaaaagaagcgagtgaacaatcttatcgacaaatgattcctgaattaacatctttgataactattaaagaattatctcattatttatcagatattaatctagtcgcttatgaagaatcgagtaaacaaggggaacacgcttgttttgcaagagcgttaaatcaggattttcaaaccattacgattattgttggtcctgagggtggctttgatgaatctgaaattaaacaaatggaagcattaggaattgaagcgtgttcattaggaaaaagaattttaaggagtgagactgccccactctatatgttaagtgtaattggttatagtagggagttgatgaaatagtggggtttatagaaagtttaaataaatttggaaagaaaattccagttcataaaacagaattgtatgcgaagatagaagaagccaaattagcattatcagcaaggggattagatgttaaaatcaaagatgaatttgatttgtttgcatatgaaattatttataatggtttattaacccaaaatgggattgaaaatacttatgaagtctttttaaatcaacattatgatttattagattatttaaattatgatgaaaaacaaaagatgtttaataatgatattgccccattattgaaagatagaccacatttttatgatgaagctagtcaaacagaaatctatattccatatttagagccttttgttaatcaaagatatacaaaagactatcaaatcttattattaaaacaacatcgtgaatatattaagaattttttggtgaacaaagatacacctgaaaaaatgtatggttcacgtatttttagaacaaagttcacttcattagaaaatgtttatgaagatcaaagacatttatgtttatattttgaaccattaaaaacaatttatatttataaaaaagattcaaaagaattattaaataaagttattattcaagatgaaaaaagtgatgaaaagattgaattagatacagttaaaacaattgcttatgatatagaaaactatctatatcaggattgtttaaatttaatgaaagaaaaacaattgatatgtttaaaaacatatcaaaaaattgttaaaaagtatcaatagaaaggaagaatatgaaaaaaacagttgcatttttaacattgggatgtaaagtcaatacatatgaatcagaggctatgttaagattatttagccaagaggggtatcaagaagttgattttaaggagaaagcagatgtttatgtgattaatacatgcactgtcacaaatacaggggattcaaaatcaagacaaatgattcgtcaggctattcgtagaaatccacaggcgattgtttgtgttgttggctgctatagtcaggtagccagtgaagaagttatagcgattgaaggagtgagtgttgtacttggaacacaatttagaaatcgtattgttgaatttgttaaagaatatgaagcaacaaagaaacctgttattcatgttgcagatgttatgaaactcaatcattttgaggatttggatattgatgaatttaccaaaaatacaagagcgttcttaaagattcaagatggctgcaataatttttgtacctattgtattattccttatgctagaggtcgcgttcgttcaagaaaacctgaaagtgtcttaaaacaagctcaaaagttagttgatcatggttttgtggaaattgttttaaccgggattcatacagctggatatggagtagatttagaagattattctttttatgatttattggttgatctcacaagtaaagtcaaaggtttgaaacgtttacgtatctcatcgattgaaatgagtcaaattacgcatgaaatcattgatttaattgctacatcaccaattgttgtagatcatttacatattcctattcaagctggatgtgatgcaacattaaaaagaatgaatcgtcattatacaacacaggaatttgctgataaattaatagaattaaaacaaaaactaccatcactttctattacaactgatgtaattgttgggtttcctggagaaagtgaagaagaatttaatcaaacatatcaatggattaaagaaatgcattttaatcaattacatgtttttccttattctcgaagaaaaggaacaccagcggcgagaatgaaagaccaagtcgatggaaatattaaacatgaaagagttaaaagattgatggaattatcgactcagttacaaagtgagtttgcttcatggcaaattggtcaagtcttagaagttttgattgaggaaagacatggagattatatggttggtcatgcttctaattatttaaaagtgaatgttgatttaccagattcttcggttggacatatttataaggttcttgttgaaaaacaagatggagttgaattgattggaagtgttgttaatgaagaaaattaatgaattatttgatgtggaagaagattttaagattgtttcgattcatagtgattctcgttatgtaggcaaggattctattttcttttgtgttgatggtttaagtgttgatggacataaatatattgaagatgctgtttttcaaggcgcaaaatgtattgtttattctaaaccgttagcttttaagcatcgtcatgttttgtatattaaagttgataatgttttagatgaattgaatcgtgttgctgatttgttttatgatcatccaagttataagatgacgatgattggtgtaacgggttcaagtggaaaaactgcagttgctttgatgattaaagaagtgctttcacattatttaaagatgggatatattggaacaaacaatattgaatatgctgatgttgtggaacaatgtccttatacaacaccagaaacaattttcttacaacgtcatttaaatgatatgattaaaaaggatgtcaaaggggtcactttggaagtatcaagtcatggtttggctttgaaaagagtagatagtgttcattttgatattgctatttttacgaatgtttatgaagaacatttagattttcatggaacaatggaaaatttaatggcttcaaaagctaaattattttcattggttgatgaaaaaggttatgctattttgaatactgatgaagttcgtttctttaatttggttaaagatacattgcattgtcatcttttaacttatggaattgaacataaggctgatgttatggcaaggaatattcaattatttattgatcatagtgaatttgatttacagattcatgatgaaatacgtcatatatcagtaccagttttaggaaggtttaatatttctaacgttttagcggtgattacatctttattagcgttagaaatgccaatgagtcaggttattgagtcgattggttatattcaaggcgtagatggacgtatggagctattaaagcatagccagcctttccatgtgattgttgattattgtcaacatgcaaaaagttatgagaaagtctttgaatttgcgcgtagtattaaaacgagtgggcgtattattgctgtgtttggagcccctggtaagaaaaattataacaagcgtgaaaaaattggaaaactggccaatcaatattgtgatcaagtcatcttgacagctgaagataatcgtgacgaagatatccatgatatctgtttagaaatacaagaatatattgaaacaccagtcagtgttattatagaagatcgtcggattgctattgaacaggcaatcgaaatagctaatcgaggtgatatcatattaatcttaggaaaagggcatgaacaatttatggcttcatcaattggtaatgagccttaccctggagataaatatgtcgcattagaagcaatcaataaaatatttgaaggagaagatgaatatgaattacaacaagtttattgatcacactgctttaaaagcagacacaacacaagcaacaattacaaaactatgtgaagaagcaaaacaatatgattttgcatcagtctgtgtcaatccaacatgggtgagttattgtgctgattatttaaaagatacagatgttaaaatctgtacagttattggtttcccattaggagcaaatacatcaaaagtcaaagcttttgaagctaaggatgccattgaaaatggtgctgatgaagtggatatggttattaacattggtgctttaaaagatgggaatactgaacttgtttatcaagatatcaaggcagttgttgatgcaagtcaagaccattgcgtaaaagttataattgaaacatgtttattaactgatgaagaaaaagttacagtttgcaagcttgctgtgaaagctggagcaacttttgtaaagacttcaacaggatttagtactgggggtgcaactgctcaagatgttgctctaatgaaagcaacagtcaaagatgcttgccaagttaaagcaagtggaggcgttagaaattatgctgatatgatggctgttattgaagcaggagcaacacgtattgggacatctgcaggtgttcaattaatgaataacgaagaaagtaaagctgattattaaaatgaaaagatttggatcaatatgattcaaatcttttattatgattatatcaaagaagggataggaaaatgaaaaaattaagtattttattgttgataggaacattatttgttggatgtcagcaatcaaagggaatagatgagtataaaggattaaagacacaagaaacatttgaaaaagtttctgataaaatggataaggaagttcattatgttcatgtggtagctgaaaattctgaaacaaaatatgaccaggaattgtatatgattgatggaaaaatacattcttttcaaaagtctgaaataaaagctaataaaaaatattcttttagtttaatgacaacggataaaaattatggtttatttgatacttatggaacaatgaaattaatggaattagataaacagccattaccaagtacctatttaaataatctctttcaaaataaagaacttaaaattatcgataccaaaagagaggataataatgatggtatagtcttaactattcaatattcatatgatgaaaatggtcaatcaaaaaatgatgatctttgttatatgaatttacaaattataatcaataatgaaggattgattgaaaaagaagtcaatacactttatactgatgacacatttcaaacaaaaagaaaagatgcacttataacggcaacaacttttttagattataaccaaaaatctcaagatgattttaataaaatcactgaaaaaattgaaaaaagtgaaggcgttctttatgaagattttgttaaaagtttagaacaataacacttaaaaaagaatataaaaagaaaatgtaagccgttacttttcaaaaagttaagaaaatttgtaaaatatgtgaaatctaatcaagtttcttcataaaaaaacttgattttcttgcattatccatgtataatgacgaatgtacttaatagtaaaggggggaagttcaaaatggcaaaaactgtagtaagagaaaatgaatctttagatgatgctttacgtcgtttcaaaagacaagtttcacgaacaggaaccctgcaagaagctcgtaaaagagaattctatgttaagcctggtttaaagcgtaagatgaaatcagaagctgctagaaaaaataaaggtaagcaaagataagaagaacgttgttcttctttttttgttttctcatatatttatcatgaggtggttttatgcttttgattgatgatgataaggtttatataaaagattatattgagatactcattatggaagatcatttctttaaaattaagatgcctaagtattgtttaaatgtaagaggtgaaggcttagctatttattattatgatcaaaatgaaatccggttttctggacatgtgaaagtgattgaatatgatgaatatagggtatgatttatatgcgattagtcaacaggatatttttcttttattaaggcatgttaaacaaaaaaagctaaaacttttacatttaagaaaaaaagatgatatgtatttcttttatattcctacatatcaaagacatcaattaaaagattttaatcagccttatgaatatattaaaacagttggatttttaaaatatgttttaaatttatctaaacaatatttaaatattattggcgtcctttgtttttttataagtgttattgtttgttcgtactatatttttgatatacagattattggtacgatgccacaagttaatcagcaaatgatgaaggatttaaaaaaagaaaaggttgatttatttcaacctttaaaaagttatgaaagattaaatgaaatattaacctatttgaaaaagaattataaagataagatagagtatatgaatgtttatcaggtagggagtgtttttcatgttgaatataccaaaagaaaacaggatagtattaaaaaagatgattttagaaatttatatgctaaaaaagatgggttgattgcttattttgatgtagatagtggcttgattcaagtgaaaaagaatgattatgtaaaaaaaggggaattattagtaagtaatacgattgtttctacgcaaaatgaaactaggattattccagttgagggacatgtttatgcttatacttttaatcaatttgaagcaagtgttaagaatgttaatcaagatcaaggagaggttttttatcaattgttgttgtcaattcgttcctctttaccaagtgatgcaataatagataaagaaaatgttttacaaatcacaaagactcgtagtaaaataacattaaagatgcattatactttattagaagatattgctgttaaaggagaaggaaatgaagaaagtcattaagttagatacttatacaattgatgaagtcaaaagatttattggaaataaagatgagaatattcaattgttagaagaagcttttcatactcaaattattgttcgtggagatgaattggttttagatgatgaagaacaaacattagataagatggaagctgtctttacgacgctattaaagcttgttaagcaaggaaaaacaattagtaagcgtgatatcatgtatacactaaaactcgctgaaacaaaccatttgaaggttatagatgagctttatcaaatcaagattgccagaacaatgagtggaaaacttatttatcctaaaactttagggcaaaaggaatattattatgctttaaaacataatgatgttgtctttggaattggaccagcagggacaggaaaaacttatttagcagtggtttttgctgttcaggcattaaaaaataatgaagttaaaaaaattattttaactagaccagcggttgaagctggtgaaaatcttggtttcttacctggagatttgaaagaaaaagttgacccttatttacgacctctttatgatgccttgtatgatatgttaggtcaagaacagacagaacgattaattgaaaaaggaacgattgagattgctccacttgcttatatgcgtggccgtacactagaagatgcttatgttattttagatgaagctcaaaatacaacagatgctcaaatgaaaatgttcttaactcgtttaggtttcaattcaaagatgattgtgacaggggatgtcacacaaatcgatttacctaaggggattatgagtggtttaaaacgtgctttgcatattttaaaagatgttcaaggtattcgttttgtatatttatcagcaatggatgttgttcgtcatcctgttgtacaaaagattattgaacgctatgaatcagatgaaagctataaagaaagcagagaatattagaactctctgctttttagataggcttttaagactttaagatgagcagttgataatggtagcttttcaatctcatctaaagtatataaatgctcaataggtacatctatgatgaaatgatagacatgcatataccaagtacgatgcgtaaagacatgtttaagatcatcgatatgagccacaatagataaaggaatatggaactttttttcaaattcctcaacaaaacgataaggactttcaatatcatattgaataaatccataaagattttctaataatcctgctggattttgaatcaagagaatctgattttgatatgtaatgattccagttgtataatgaatttcttgatgtttgatattttttatattgataggtaagactttttgttgatttttagcataagcaagacaatgtgattgaatgggacaaatatcacactgtggattgataggacgacaaatcgttgcgcctaaatccattaaaccttgattaaaagctgaactatcataaccaatcaaaagttccttgacaatatcagtaatctttttttgcgtcttatttaaagcaatattatctttaagtagatagactcttgagataatgcgtaagacattaccatcaatcgctggtgtggattgatggtaagcaatggaacaaatagccccagctgtataaggaccaataccttttaaagcaagaatatcttcatatgtgtttggaaactctccatgatatttttcgacaatgatttgagctgtttcatgaatatgtttagctcggcgatagtagcctaagccttcccatagtttatagacttcttctaaagaagcattagctaatttatcaattgtatcaaaggtttccataaaacgtttaaaataaggaatcactgcttcagttgttgtttgttgaagcataatttcactaatccatatgttataaggattttcattttcacgccaaggaaaatgacgatgattttcctggtaccaagttattaatttatgttgcatattgttttgcatattatcacccaaagcattatactataaataatgtaaaaaaagcaaaggatgtgatttttttgaaaaaagaagataaaattatacattcatcattaattgaaaccaaactcatggacgaacgcttatcgccatatgcaacgaaaaatagtgaatgtattaaagttaaacatacattaaaaccatcaactgaatttgatatctgttggccttttgaaaaagacattgatcgtgttctttattcaaaaagctattcacgttatgtcgataagacccaagcgctatcattttttagtaatattcatattaccaaacgttcacttcatgttcagtgggtttctcgtattgctagacagattggacgtggcttgaatttaaatttggatttgatagaagctattgctttaggtcatgatttaggacatgctccttatggtcatgttggtgaaaaggccattaatgattgtttggaagaaagacattttggatattttactcataatgcaaatagtgtcagaaatcttttatttattgaaagaaatggagttggatataacgtttctttacaagttttagatggtattttgtgtcataacggggaaatcttatcaagaatatataaacctgatcgtcaaaagactatacagcaattttggcaagagtatgaaaaatgctggcatgaaaaagattattcaaaaagaatcttaccaatgacattagaaggttgtgtcgttcgtatttcagatgttatttcttatgtgggtaaagatatagaagatgctattaaggttggaattattaatgaagatgatttaccagaagaagtggttagagttttaggtaaagacaataagtcaatgattaatcgtttaataggggatattgtgattcatagttatcgcaaaccttatttagagttttctccagaggtatatgcggctttagaagtgctttttgattttatttctacacatattcatcaccatccaacattagttaaagaaaatgagaaattgacacgacttgttaaggaattatataatgccttttatgaagatttgttagatgataaagatgaagatcatggcattgatagacatgtctttaaaatgattgaaacatataaagaaacgccaccagaaatgattgtaagtgattatttatctggtatgacagatacctatgctttacgtgtttatgaagatcgttttttacctaagcaacatggagaaatgatacaagatgattaaaaaaggatgtaattgttaaaaaaaagtgttaatatataattaaagaagggggttatgtaatgaaacttataattgcaattgttaataatgatgatagttccactgtacaatctgctttaactgaaggtggattctttgttacaaaactagcaacatcagggggatttttaaagaaaggaaatacaactttctttattggtaccaatgatgacaaagttgatccagctttagaaatcattaaagcacatgcaagaaagcgagtggaaaaagaaccaactgtaccacctactgaaatgggtgaattctttacaccaatcatggttgatgttttagttggtggagcaacagtttttgttgttgatgttgatcgctttgaaaaaatttagaaaacagcttcggctgttttttgttttgttttgatgtatagcattaatattgatgttgaatagggattgtgctatgatatgaaaataaaacaaggtcaataataattggtttgattcttgataaaggagtacatatggaagttagaattttaagaggacatgaagttcatgaagcaaattgtttaataatgaaaatgtttgataaatatatagccgttgattgtttaaaagaaagtcaacaagcattaaatgatgaaaatattttagctttaatgaaagctggaattttaataatgataggagctttcatcaatgaacaaatggtaggggttattggaataaagaatctagaagatattcaaattctatttgtagatgaaaaatatcaaagacaatccattggaacaacactgatgaatcaagctaagaaattaatgtatggaactattcatgttcaagcaaatattcaagcagttgccttttttcaacaaaatggttttgttataaagggaccagaacaaattgtcaatggattaaaaactgtaacaatgagctataaaagtcatgatgagaaaaagtttcatacatatgatgaagtccatgattttatagctagtcaaaaagatcgtgtttatgcattagataattttaaacgttttatgaaagatatgggtgatccacagaagctattaaaaacaattcatattggtggaacaaatgggaaaggctcaacaacaaattatgtccgttcagtcttgcaaagagaaggttataaggtggcaacctttacttcaccagtattagttacacgattagaagttatgcggattaataatgaacatatccgtgaagatgaaattattcgctatgcaaatcgttatatgtctgaatggttggcttatgaactttcaatgtttgaaatagaagtttttattgctattatgttttttattaagcatcatgttgattttgcagtttttgaagttggtctaggtggtgaattagatgcaacgaatattgtttcaccaattattgcggcaaatacaaatatcggtttagatcatacagaatatttaggaaatacatatgagcagattgcgcgaacaaaaggtggcatcattaaagattatgttccttttgtgactggtgaaaaaaaacaagagtgtattgaagtttttcaggagatttgtcaacagcatcatagtccattattatttgttcaacctttacataatgtttgtgatgatcaaggaaaagtgacttatgattatcgtcaatatcatattgaattaaatactgcagctaaatatcaaagtgaaaatagtgctttagcaattgaaatcttgttgtatttaaaagaaaatggctatattgaattaaaagaagatgatttgctgttaggtttaaaggaagcaatttggcaaggacgctttgaaacagtttgtcaaaaacctttgatgattattgatggagctcacaataaagagggtatgatggctttttatgaatctgctaagaaatatcacaatatcaaaattatattcagtgctttaagagataaagatacgcatgcaatgttggagttgttattaaaattaagtgatgatgttacagtttgtgaattcgatttctatcgcgctcaaagtgctatcaagttagctgaagatttcccagtaaaaattgaaaaagattggcataaggcgattgatgatgcttttagccatgatggggttgtttttatcacaggttcactttatttcttgtcacaagttcgtccttatatcattaatcattaatagttaaaataaaccttgtttttttaaaaagagtatgctattatcacatagaagaaaaacgactgaaaaaaccaggagaaacttcctggttttctttatggatttttctcaatatgaagttttaaaatgcaaaatgtgttaaaaatatatgtgagacgttcgccttaattagttatagtctataactctgtgtaggtggatgtatgtatcacaaatatcgacatgcaaagagtagattataaaaaagaaagaggactatatggacaaaataacatttaaagatttaggtttatcgaaagacgtattaaaaggaattgaaatgatggggtatgtatcaccttcaccaattcaagaaaaatcaattcctgttttattagaaggtaaagatattattggacaagctcaaactggaacaggaaaaacattagcatttggaagtgttttattatcaacaattgaaaagaataataaacaggttcaagcattgattttatccccaacaagagaattggctttacaaattcatgaagaattaaaacgtattggaaaatatactgatttatcaattgtgagtgtttttggtggaagtgaaattgataagcaaattaaaaatttaaaacgtggagcggatattgttgttggaacacctggtcgtgttcaagatttaatgcgtcgtaaggtattgaagattgatcatattcaatggatggttttagatgaagctgatgaaatgttgaatatgggatttattgaagatattgaaaatattttacaggcaacaccagctgagaaaagaacaattctcttttccgcaacaatgccttcagatatcaaaaaaattgcgagtaactatatgcaagaagattatatgcatattcaaataaaatctaagacaaagactgcatcaactgtttcacaatattactttgaagcagcagctaatcaaaaatttgaagcattatgccgtatcttagattcacgtgaaatggaaaatacaattattttctgtaaaaccaaaagaagtgttgatgaaattgtagctgcgatgcaacaaaaacattataatgtagaagcaatgcatggtgatttatcacaaaatcaacgtatgaatacattaaaaagatttaagagtggacaagttcaatatttagttgctacggatgtggcagcaagaggaattgatgttgataatatttcacatgttattaattatgaaatgcctcaagatgaagaattatatattcaccgtattggaagaactggacgtgcaaataaaaaaggggaagcttattcgattgttacaaatcgtgaaaagaatttcctgatgtcaattcaaaaaagaactaatagtcatattgaagcgatgccgattccatcaaatcaagatatttttgatcaaaagattaaagaattgttatttgatgtacaagaagaaatgttaaaaggaaatttagaaatgtttgaagatatcgttaaagatatccctagcaacatgaaaaatgaagttttagcaactttactttcaatgtgttatcaacaaagagttggttttgattataaagaagatatgtctaatcgtgcatatgatcgtatttttatgactgctggatcaatggataagattagtgttaaagatattattgatttctttgtgaaatttggaaagattaagaaaagtgatattggggatgtgacaattaagcgtaaatttacttttgttgatattaagacacaagtgagccaaaaagcggttaaaggatgtcataatcaaaaaattaatcgtcgtaaggtacgtttagagtttgcaagtgaaaaataattattttttctaaatatacgaaaaaacttgacatgatgaacaaaatttgaattttaaggacaatttcaaaaaggaaattgtcttttttttcacaatttaaggcaatttaaggttgaatgtaagcactcacatagtgtataataggtaaagtagtaatgaaggaggaacttatatgaaaaaatatgtctacctatttagcgaaggtaataaagacatgcgtaaccttttaggtggtaaaggtgccaacttagctgaaatgactaacattggtttaccagtacctcaagggttcactgtcactactgaagcctgcactaaatactatgaagacggaaaaatgatttctaaagaaattgaagatcaagttagtgaaaaacttgcagagcttgaaaaaattacaggtaaaaagatgggggacgctcataatccattattagtttctgtacgttctggagcaagagcatcaatgcctggtatgatggatacagtcttaaacttagggatgaacgatgaagttgctaaaggatttactgaagtaactcataaccctcgttttgtatacgatagttatcgtcgttttattcaaatgttcgcagatgttgttatgggattcccaaaaagctcatttgaaagaatgtttgacaaagttaaagaagaaaaaggtgttgaatatgacactgaattaactgctgaagatttaatggaagttgttgaaatctataaaggtgaatacaaaaaacatgctggagaagatttcccacaagatcctaaagttcaaatgatggaagctatcaaagctgtatttagatcttggaacaatgaccgtgctattacttatagacgtttaaatgacattcctggtagctggggaactgctgttaacgtacaagaaatggtatatggtaaccgtggagatacttctggtacaggtgttgctttcacaagaaaccctgcaactggtgaaaagaaattatatggtgaatacttaatgaacgctcaaggtgaagacgttgttgctggtattcgtacacctcaaacaattgatacattaaaagaagttatgcctgaatgttatgatcaatttgttaaaatcaataagattcttgaagaacattacaaagatatgcaagatatggaatttactattgaagatggtaaattattcatgttacaaactcgtaatggtaagagaactgcagcagctgcattaaagattgctgttgacttagttaacgaaggaatgatttctaaggaagaagctttattaaaagttgaacctaaacaattagatcaattattacatcctaactttgatgatactgctttacgttgtgctcatgttgttgctactggattagctgcatcacctggagctgcaactggacgtatttacttcactgctgaagatgttattgaagctaaaaacaatggagttcaagatatcttattagttcgtcttgaaacttctccagaagatatcgaaggtatgaatattgctcatggtatcttaacaattcgtggtggtatgacatcacatgctgcagttgttgctagaggtatgggaacttgctgtgtatgtggatgtggttcattaaagattgatgaagaagcaaaaatcttaacaacacctgatggtaaacaatatcatgaaggtgattatatgtcattagatggaagcactggtaatgtttatggtgaacaaatcaaaactgttgaaccagaaattagtggtgacttcgaaacattcatggaatgggctgatgaagcacgtactttacaagttcgtactaatgctgatactcctagagatgcattacaagctcgtaaatttggtgctgaaggtattggattatgtagaactgaacatatgttctttgaagaagaaagaattttcaacttcagacgtatgattactgctgaagatgaagcaacaagacgtgaagctttagaaaaaatcttaccatatcaaagatctgacttcagagaattatttaaagctatggaaatctatccagtaacaattcgtttcttagatccacctttacatgaattcttacctcatactgatgaagaaattagacctttagctgaaagcttaggtatgacttttgatgcattaaaagcacgtgttgaatcattaaaagaattcaacccaatgatgggacacagaggatgccgtcttgctgtgacttatcctgaaattgctgaaatgcaaacaagagctgttattgaagcagctatcgctgctaataaagaaggacaaaatgttgttcctgaaatcatgattcctcttgttggagatgttaaagaattaaaatatgttaagaaagttgttacagaaacagctgatagaattattgctgaagctggagttgaattaccatacaaagttggtactatgattgaaattccaagagctgcattaacagctgataagattgctgaagaagctgaattctttagctttggtacaaatgacttaactcaaatgacttatggattcagccgtgatgatgctgctaaattcttaggtgattactattctaaacaaattttcgaatctgatccatttgcaaaagttgaccaagaaggtgttggacaattaatgaaaattgcagtggaaaaaggtcgtcaaactcgtccagatatcaaattaggtatctgtggtgaacatggtggagaagctagctcagttgaattctgccataagttaggattaacttatgtttcatgttctccataccgtgtacctttagctcgtttagctgctgctcaagctgctgttaaagaaaaattaggtattgaatagagtttatagagagatatgcttatcgtgtatctctttttttcttttttcattatgatataattatattagttatcttataaggatatcaataaatgaagctagcaaaataattagtaaattttattatttaatggttgaattgtctttaattgattagggggatgattatttgtgaaaaataaattattaaataatcgtatggaataatgaatgattttcgttttgaataataacaataagtgagatgataaatatgatttatgttatgagtgatttacatggtgaatatgaaaaatacaaagcgatgcttgataaaatagaattacgtgatgaagatacactttttgtgcttggtgatgtgattgatcgaggcaatcagggtattcgtatattgttggatatgatgaatcgagaaaatgtctgtccaatttcagggaatcatgaatatatggcatcctgttgttttggttggttaaaaaatggcattactcaagaaaatatgaataatcttaaagatgaacaagtacaagatttggctgattggatggcaaatggtgcttatccaactattcgagagttaacattgctaagtcgtgatgaacaagatgctgtatttgagtatgttttgaatttttcgctttatgaagttgtttatgtgaatcaacaaaaatatatcttagttcatgctgggttaggaaattttaatccacttaaagaattatcagattatacaattgatgaacttgtttggcaaaggcctaaacttgaaaaaagactttttgatgatttagaaacatttgttgtttgtggacacacacctacaccattaatttgtggtgaggcaaagatttatcattatcatcaacaaatctttattgattgtggagcatcttttcagggtggaaaattagggtgtttgtgtttagatacgatggaagaatattatatagactgatgaaaaataaggttttactttttcttgtatcgactgataagatgaactatgctataatagggaaaaaagtgtgggtggtataatgagaattcaattgaatttagatagtattgctgttcttttattttgtggtgatttgattgttgataatacagcaccactttcattggaagaatggaatgatgtagaaagaaaattaaaaagttcatcaagaaaaacaccttctaaattatttggtatgaataaagatacacttatccaaattttagggattgatgaatatatagcatataaaatgattgcaagattatcaacattaaatgatttaatgtttgctttagcaaatttagaaaatgaaggtatcttcattactacaaaatatgaagataactatcctaaagtcttaatgacttcattaaaaaaacgtgcacctttatatttttattatgttggtgacttgtcaataacttcatctccaatgatttcagtagtgggaccacaggatttagaaagacgcttaaattcttttactaaaaatgttgtaacaaaaatctatgatgaagaaaaagttttagtatccaatgggacaaaaggaacagatgcttatgcattaaagacttttatgaatttgggtggtaaggcagtttgtgttgtgagtgatcatatgtttgataaaaagaaaacttattctaaatatatcaaggatgggcggatggttttaatgagtgcagttgatccttttgcttattttaatgttacaaatgccttggatagaaatatttatgtatgtggattatgtgataatcaaattattacagcgacacatattaatagtggaagtgtatggtttacaactattcaaaattttcattatcattggacaaaacaacttgttttagatgatgatcattatggaggaaatatacgtttgttagaaatgggagctattaagttaacttatgaagatattttgtcattattaacaattgaacaaattattgaaaaaaatgaagttgtagaggaggaagtagaagtgcttgtagatcagatgtctatctatgagttcttggatgaataatatgttaaatgaattgaaaagaaaatttaaaaaatttcccatcacaatttcattgattgggatttgtgttgttgtttatgtcatatcttttgttttgtttggagaagaaatgaatacccaagaaggcttagtaatgggagcttataatcctttatatgtttattataagcatgagatttatcgcttgttcacagctaattttattcattttggtttgttgcatattgccgtgaactgttattctttatatggtttagggatgtttattgaagcttctttaaagactaaaaaatatgccattgttttattgataagtgctctagcaacaaccactttaccattcttattatttttattgaatggttttggagcttatagtgtaagtggtggaatcagtggtgttatttttggtttgattggtgctttaggagctttggctttaaaatatcgtcaggtttttatggatgtttttaaacaattggctcctaatgttattttgatgttagtgatttcatttgttgttccttctatctcaatgtctggacatctttctggattgattggtggctttgtatcaacatatgttattttaaatatcaaacctaaaaagaaaaatccttatcgtgatttagtgaattaaaggagaagaatatgaagaatcaaaaagtaagaaaagcagttattcctgcggctggactaggaacgagatttttaccagcaaccaaagcacttgctaaagaaatgcttccaattgttgatactccaacaattcaatatattattgaagaagctgtagcaagtggaattgaagaagtattagttattacaaatagtaataaacatgctatggagaatcattttgatgtgaattatgaattagaagaaagattaaaggcatcagggaaagatgctcaagttaaaatgattagagatattgcaaatttagctaatatttattatattcgtcaaaaagagccaaaaggattaggacatgctattttatgtgctgaaacatttattggtgatgaaccatttgcagtcttgttaggtgatgatattgttgtaaataaaaattcaaaaccagcattacaacaattgattgatgcttatcaacagacacaatcatctgttgttggggtacaaacagtggataaaaaagatgttaacaaatatggaattgttgaacctgatgttatgcactcacctaaaggtcgtttagttaaattatcaagtatggtggaaaagccagcggttgataaagcaccaagtcaaatggctgttttaggtcgttatgttttgactcctgagatttttgatttgttaaaaactcaagaaacaggtgctggtggtgaaattcagttaacggatgcgattaaacgtttgatggatcgtcaggcagtttatgcatatgattttgaaggaattcgttatgatgttggagataaatttggttttatcaaagcaacaattgattttgcaattgatcgagaagatctgcatgatcaagtattagcttatattcaaaagattgcgagggaagattaatgtcgtttcaagaaaaatttaaagcatatcaagaaagacaagaagcgaagaaatattttcgttcaaataatgatcaatttttagattctagtcaatgggttaaaacaattgtgggcggattattagcagcaattgcttgtggtattattttaggagtagtgattacagctttacatataacatcatcattattttatttgatatgtggatatgttgttgctatggcagttacaaaaattgcgaatgttcattccaatcaagtggctattgtgagtgttgttttaacgtttgtttgttttgttgttggtgaaatgacaatgatgtacttaccaatttatgaaatgggaattggtattggaggtcttggaattattaatcttatagttattagtgttaaaagcttattttttggtgatttgtttacgattattattgctgttttaggtttgtttattgcctatgaagttgcaaaataaaacccaggattttcctgggttttaacaattttgtttaatatctggctgataatattttttgacatattcttcgtaaagctctctaaatctttcatagtgaatgatttcacgttgccttaaaaaagaaagtggtgcaagtaaatcagggtcttgtgtttgattcataagattttcataaacagccctggctttttgttcggccgccatatcttctgcgatatcagcgactggatcgcctgttgctgcaaaataggcagctgtaaatggaacaccatttgagtcgactgggaacaatgagcaaccatgttcagtataataactttgtaatccagctgctttgatttcttcaatagaagcaccttgtgttaattggtacaccattgttgaaaccatttccatatgaccaagttcttcagttccaatgtctgtcaataaagcttttcctttttcgtcaggcatagtataacgttgtgaaatataacgcatagatgctgccaattcaccattaggacctccgaattgagtgataatatatttagccatacttaaatctttgtttttaattgaaatagggtattgcaattttttgctataaagccacatttatataattcctccttttaacattgatattcccaaggccaaggaccttgtacccattgaaatgggactttgttttcactatctgatactaataaaggtccaaattctttttcaaaatcttttttggctgctttggctttatcagcatattctctataaagttgtaccattctttgattttttggatggatatccaaataaagattgatttcatgtgccacaaattcatatgtttgcacttctaataaagcttgttgtcttttattttgaggttgcaaacagtaattagaaaagccacgataagacatatataattctttaaaaagatttcctaacataatggcttcttgagcatcaaataattttggatttgtatcacagtgactttctggcataaaaaatggttgaaaacatgattgattgtcttgataaatattcataataacctccttcaacaatagagtatgtttttaattttgtttggttaaggacaaatgtttattttcagttcatattatatgattataatgaagaagaaagggtggttatatgaaagttcaagtcgtatatacaacacattgtaaagatgctaaattactcgctgaagacattgccagatatgcgcgaacatacgcaagaccaaccactgagtttaattttgatgaggatattgatttattggttttaggttttgaagaatatccttgtgtaaaagataaagaattagaggagtttatctgtcgtctgtctcgtcagcatgttcataatttagctttgtttaatttgttttgttttaagaataaacaaatggataagattattgagctttgtcaaaaacaagatttacctttaatgagagaaacttattcatgtaaaaagagtttaaagacaaaacattgtttagatgatgatgttgtttcgggtggaagaatatatatagaagatatggttaatatttgtaatcattattattagaaaagagcctttgctcttttttttaatagttcaatatgatacaataatttacattaagggggaatttataaaatgagtaaaaattatcgttttgaaacattacaaattcatgcaggacaaaaaccagatccagtcacaaaagcaacaggtattccaatttatttatcaaatgcctttacttttgatgatgctgatcaagctaaaaatatatttgccttagaagaaggtggatatttctattcacgtctatcaaatccaactgttgatgcccttcaacaaagaatggcagccttagatggtggagtgggagcagttgcttttgcctcaggaacagcagcaattatgggattgattatgacagtgtgtgaaactggtgatgaaattattgcagctaataatttatatggtggaacgattggttcactatcaggaacaatggcaggaatgggatttgtttcacattttgttaatcctagagatttaaaagcaatggaagctttgattaatgataaaactaaaatcatttttgttgagtcagtaggaaatcctaatggcgatatgctagatttcgatgcaattagtgcattatgtaagaaatatggtattttatttgttgttgacaatacaacaccaacatcatatttatttagaccaatcgaacatggtgctgatttagttgtgtattcaacaacaaaatatattgctggtcatggtaatgttatgggtggtattattgttgatagtggtcaatttgattggcataatgaaagatatccattgtttacaaatcctgataaagcttatcatgatattgtttatgctgatttaaatgaagctgctttttgtacaaaggctgttgctaaaacacttagagatttaggtggatgtatgtcaccatttaatgcttatttaactttacttggattagaaactttatcattacgtatggataaacatgttgaaaattcaagaaaaattgcacaattcttaaatgagaatgaagcggttgaatgggtaagttatgcagaacttgaaggtcatgaatcacatgaactatgtcaaaagtattttcctaaaggatttggcggattgtttacttttggggtaaaaggtggacttgaaggtggtaagacagttattaatcatattcaattatttactcacgtcacaaattttgcggattcaagaagtttattgacacatccagcttcaacaacacatgctcaaatgagtgaagaagaaagacttgctggtggagttcaacaaggtacaattcgtatttctgttggattggaaaatattgaagatttaattgctgatttgcaacaagcatttgataagattcaataaaaaaactataacatttgttatagttttttattcaacaatcattgcattaggaataggtgcttttggattatctttattaatatgatcataaaagagtttaccatcaaaatgatcaagttcatgttgtaagcagatagataaaaatcctctagcaacaatagttacatcctgatgagttaaaacatcatatcctttaactgtgacttttgcatgtcgaggaacatatccatcaacatcatcattgacacttagacatccttcaccatcttttaaataagattgtttttctgtataggatacgattttaggattgactaaggcataatcatcagctttttttatatttccttcatcatcatatgtaagaacatggatagcacacattctttttaaaattccaagttgaacagcagcaattccaacagctggtcttaattgatatttttttgacatttcttcatcttgagaatttactaaaaattcatgcatatcaagcaataatttttcatcttcctcacttactggcatttcaacgggttttgaaatttcacgaataagaggatgatgatcatcaataatatctttcattaaaatcattgtattcacctcgcgttcttcattctatcacaaaaataaaaaatatgctagaaatctagcatattttcatgtgtttaacagatttttgtacatccacaaatgataagcaataaaaagacaactaatacaatagcaaaccaagtacatccactacctgatccaaatccacatccacaagatgacatgactgggaaagattgacatccacacccacagccactacatccgaatggattacaaggaaatgttggcatatagctattgcatccgcatcctccataattataacaagagttcattgaattccctcctttcaatttaaggtattcttcttttacaaaattgctagtgtttctacccaattcttattttattttttttaaatatcatgtataatagtgaggacaaggaagtgagagaaatgtatgattacccattagacccttattggagtacacaagacattattgatgtgatgtcattatataatgcagttgaaaaagcttatgaagaaggaatatctaaagcagagtttatggaatgttatcgtaaatttacagcagttgttgattcaaagagtgaacaaaaacaaattgatgctgcttttgagaaagcatcccattattctatctatcgtgtttttttaaaggctaaagacaacgattggattgacatgcgatgattagtttattaaaaagaatatttaaaagccggggtgttgataaacttatttatgcctgtgtggttattttaacaatctatgggattgttatgattggtagtgcatcggttggacaaacagctaagtatggtcctacatacgcaactatgaatatgattaagcaaatgatctttgtattgagtggttttgcttttatgatcttttttacccgttgttttaaaaaagggtgggttaattcaccttcaacttgggtaacatatgtcattggtttagggctgatgattgtctgtttggcgtttagagatgtaaaaggatcacatgcatggattcagattggttcttttactattcaaccagctgaatttatgaagataattatgatcttgtttttatcttttcattttggtgaaattgaagaatattgccagattcctaaaaatattagtcgtaaaaagaaagaagaattacaaaaaagaaagctctggtattgtgttgttagaccaatacttgcaattattgtagtcttttttgtaggggttcttttacaaaaggatttagggagtgcattgattttagcgtttatctgtatgatgttattctttattacaccgcgaccttattatacaaaatataaaaaactatcattgatcttattagttattgcatttgttgttgcaattttaggaatgaactttattttgaagcctcaccaattaggaagaattacgacttggcttaatcctttattagatgaaaaaggggatggctggcaattggtaaatgctttagtcgctttttctaatggtggattgtttggtcaaggctttggtgcttcaagacaaaagtatggttatattcctgaatcacataatgattttattgttgcaattatttatgaagaattaggtttagttggatttttgttatttttaattccttattgtatcattatatataagatgtttcattatggaatgaaagtgaaagagactaagagtaaattaattttatatggtgttgggctttatttctttactcatttattagttaatgttggtggagtttcaggattgattccaatgaccggtgttccgttactattgatttcttcaggtggttcatcaacgtgggcagcaatgattggcataggaatagctcaatcaattattgcaaaatataatcgtgatcttttaaaagaacaaatttcatagttttgcatattctaatataggtgagaatatggaaatagatgattttaagagttttattagaacgattccttcaattaaggatgaggttgttaagggacgatatacttggcaacaattgtatgaattttatgttctttatggtgaagatgataaaatgtgggaaccctataagaagtcccaggtagatttaacaggtatttttgatattattaaaaatgttgatttagatgctctatcaaagagctttgaaggaattcagaaagttttagatttggtcagtgggtttgttgtgaaagaggaacctaagaatgtaaagaataggcaatggtatgatgattgatgaagatattagaatgtatttaagattacatcccaaatggtatctgattctttcacgctacccacaagaatttccaactttattagaagaatatcgagtggaaaataaactaacaatggctgatcgtattgaaaagataggaacaatgttacagatgttagaagttttattataggtgagaatatggaagaaataatcaatgaactgattgatgctattttaaaagatgaaaaatttaaggcttatcaacaagcacaagaggcattgtatgatgaaaaaaccttagcgttattgtcacgtcaaaaaacaatgcaggaagattatttaagattgaaaaactatctagatgagtcatctttaagccagatgaaagatgaattaagagaaataaaaaaagaagttttagataatcctaaaatcaaatcatactatcaaacttatcatgaattaaatgatttgttagaaaatgtaacaaaaacggtttttcaaggaattagtgaagatattacattggaaagatttcaattgtgagggaagttatgagagttattgcaggtaaatttaaaagtcgtcaattaaagagtgtagattcatctcacacgagacctacaactgataaaaataaagagaatttgtttaatatgattggtccttattttgatggtggaatatgtttagatttgtttggtggtagtggaggacttggaattgaagctttgagtcgaggaatgaatgaactttatagtgttgataaacagtacaaggcttttgccactataagagaaaattttaaattgttgaagattgaggatgttgctcatgtctataagatggattttagaaaagcattacaacaatttgctcaattgggattgaagtttgatttggttttattagatccaccttatggtttaaagattaatcaagggattctttcgtttttagatgaacatcatatgttaaatgatggttgtcttgttgttgtggaagatttaaatgaagaagcatttgaaataactcaaccatttgtattaaaaaagcaacagtcgtatggaattacaacattacaaatattagaatataaggagtaaacgatgatgaaggcagtatatgcaggaacatttgatcccgtaacaagtggacatttagatattatagaacgagctagtcgtatgtatgatcatttatatgtgactatttttgataatccaacgaaaaaaacaatgttttctttagctgaaagattagaattattacaagctgtaacggcttcttttgaaaatgtttcagttgattatagtagtgctttagctgttgagtatgctaaagaagttggggcgagtgttttggtgagaggacttcgtgcaacaatggattttgaatatgagttacaacttgctttttctaatcaatatttagatgatagtgttgatatggtctttttaatgacaagacctaatcattcttatatttcttcatcatcggtgaaggaaattgcaactcatcatcatagtgttgagggacttgttccaccaattgtggaaaatgcattaaaaaagaaaatcgatgaatagataattgtcaaatcataagagttttggtatgatattaaagataaaggtatatctattcatgaaatataaatataccgttaaggtatattttttttggaaggagacaagcatgaagaatattgtaaatttagatgatttaagtcttgatgaaattaatgatttaattgatgaagcattggcttttaaaaatggtaaggttgttgattatcaacaaaagaaagtcgttgcaaatctgttttttgagccatctacaagaactcattatagttttgatatggcagcagggaatcttggttgtcgtacacaaaattttgaagcaagcaattcaagtctaaaaaaaggtgaaactttatatgatacttgtaagctatttgaaagtattggttgtgatgcattggttattcgtcatagtgatgatgactattataaacaattaacagctttaaatgtacctattttaaatgctggtgatggaaaaggaaatcatccttcacaatcattattggatttaatgacaatcaaagaagaatttggtcattttgaaggattgaaagttgttattgtgggggatattcttcattcaagagttgctcattctaattataatgtgatgcaacgtttaggaatgagtgtatacacatctggtccattagaatataagcaagaaggatataattatgtggattttgatgaagtgattgaagatatggatattgtgatgttacttcgtgttcaacatgaaagacatcaaggtgatgaaaacttctcaaaggaaaaatatcatcaaatttatggtttgtcattagaaagatataatcgtatgaaagatacagcaattattatgcatccggcaccaattaatagggatgtagaaattaaagatgaattagtagaaagtgagaaaagtcgtatttttacgcaaatgagaaatggtgtttttgtaagaatggcgatgattcataaggtattagaagatgaatagttatttattaaagaatgcgcatttgtatattaatcatcaatttgagaatgttgatattcttattgaagatgggatgattacaaaaattgaaaaaaacatagaaagagatgttcctacttatgatttaaaaggaaaaatggttgcacataactttattgacatgcatactcatttaagagaacctgggtttgaacataaagaaacaatctacagtggaacaatgagtgccttgtatggtggctatggaactgttgtggctatggcaaatactttaccttgtatggatgatttagagacaattgctgattttaaaaagagagttataaaagatggacaagtgaatacttatacatatagtgcaattacaaaagatttaaaaggtaaagaacttgttgatatggcacatattgttgaagaagatattgtcttaggtttttcagatgatggaaaaggtgttcaaagtgatgagatgatggatttagcaatgcagcttgcaagtaatattgattctattattgttgctcattgtgaagatgaaagtgaattacatggtggatgtattcatgaaggacactatgcaaaagaacatgatttaattggtattaatagtgcttctgaatacaaacaagtggcaagagacttagaaatagtgaaacattatcaaaatcgctatcatgtttgtcatatttcaacaaaggaaacagttgaattgttaagacaagcaaaaaaagatggcttaccagtttcaggagaagcaagtccccatcatttaattttaacagaagaaaatattaaggattgtcatccaaactataagatgaatccaccactacgctcaattgaagatcatcaagctttaattgatggactaaatgatcaaacaattaaagttattgcgactgatcatgcacctcatgccagagaagaaaaaaataaaccaattcaagatgcgccgtttggcattattgggattcaacatgcttttccattattgtatacatatttagtaaaaaagaatttggtgaaattagaaacaattttagatgctttaacaactggctctgcccatgttttacgtttagaaggagatgtaaaattaggacaaaaagccaatctatgtatctttgatttagataaagaatttgttattgaagaagatgatatcaaatcaaaatcaatcaatacaccttttttaggagtcaaatgttatggaaagattgttgccaatatcgttaatggaaaaatgacagaaatggaggaaatgtaaatggcaaattatcaaggaataatgactattgtttcaaaaagagaacttgttaaagatgtctatgaaatgattttagaaggtgaagccgcaagctatattacaacacctggtcaatttattaacattaaaattaatgattctttacaaccttatttaagaagaccaatgagtatttgtgattatgatgaaaatcatataacaattatctttagagttgtaggagaaggaacaaaaatcttagcacaaaaacaaatcggagatcaactcgattgtttaacaggtcttggaaatggatttattgatttagatcatcaaagtgctgttgtcattggtgggggattaggagttccaccaatgtataaacttgcaaaagagcttttagcaaaaggtgttaaagttacagcaattttaggttttaatacgaaagatgctgtattctatcaaaaagaatttgaagcgttatgtccaacatatgttgcaacaatggatggaacacttggtgaaaagggaactgttgttgatgttttaaaaaatcatgattttgatatggatgtgtattatacatgtggtcctgaaaaaatgttagatgctttagcattggcttatcctgataacggatatttgtcatttgaagcacgtatgggatgtggatttggggcatgtatgggatgttcatgcaaaaccaaaacaaaaccatataagagaatatgtgtagaaggaccggtattacattcaagcgaggtgattgttaatggctaatttacgagtaaaactaccaggtttagatatgaaaaatccagtgattccagcaagtggaacttttggatttggttatgaatttgcaaaattttatgatattaatgttttaggttcaatgatgttaaaaggaacaactttagaaccacgttatggaaatcctttaccaagaattgctgaaggaccaagtggcatgttaaatgcaattggtttacaaaatccaggttcagaagctgttttccatgaagaattagaaaaattaagacctttgtatcaggataaagtgattgctaatattggtggaagtgccattgatgattatgttcaaacggcaaaattactatcttcacatgatatggtaggagcattggaattaaatatttcttgtcctaatgttcactgtggtggaattcaatttggaacaaatcctgatatggctgctgaagttacacgtgctgtgaaagctgtcagtcaaaaacctgtttatgtcaaattgtcaccaaatgtaacagatattgtcgcaatggcaaaagctgttgaagctgctggagcagatggaattacaatgatcaatacaatgattggtatgcgttttgatatcaaaacaggaaaaccaattattgctaataaaacaggtggatatagtgggccagctattttcccagtggctttaagaatggtttatcaagtttctcaagctgtcaatattcctattattggtatgggtggaatttcaagtggtaaagacgcgattgaaatgatgattgcaggagcaagtgcagttgcggttggatgtcaaaatcttgttgatccatatgcttgtccaaaaattattcaagaaatgaatgatatcttagatgaaatgggaattgaagatatcaatgaaatcgtgggaaaatcacatcaatattaagatgcatcaatgagtgcatctttttttattttaaaaagtttgttattctactaagtttgattttttatttttaaatatcgataatataattatgatttcatcataagaaaaaaattttttatcttattaaaatttgaattatccgcttttatttgtgcatactattttgggtgatgagatgtctatatatattcaacttttacttgcaagcttcttttggggaagtaatgttattgttatgaaattacttttaaaagaaataccttttttattattggcatcaatgagagtctttttttcttttgtgtttattgctatttatatgaaattcaaaaagtttgattttcattatgaacataaaaagaaggcattgtttattggtattttagctatctatttgaatttcttttttacttttttagggatgaatgaagtgaaaggaattgataatgcttttatgaatgcattatcaccaatgttaacttttctattttctgttttattattaagacaaagagggagtcttaaagaatatattgcactttttttaactgtttttgcatttttattatctattcgtttccgaattttttctattaaattaggtttctggtatttatttttaggtatgattttatatatgctagctaatgtcatgattcaaaaatggcatttacataattctttaactttgactttgtatgaattattatttggttttttgtttttagcaatccattgtttatggaaaggacaatttcaatatcaagcattgttaaagataccattatttcattggatcttgtttttgattatttctggaataggttttgcttttattcaagtaacatatatgcaatcgattgaaaagataggggcttttcagacaagcttttttttaagtttaaatcctattgtgacctatgttgaatcattaatatttttaaatgaaaaatttgattggttacattttattggttttatcattttagcaattgctatctatttgatgaaaaaccataaagaaaaaggaactactctttctcataataatgaataagagcttgtgttcctttttcgttgtcagctaattcttcatacatttttaatactgtatctaaaacttttaactgaatatcttcatcgctcatttctttttgagctatcttcatgtctttgataaaatgtttaatataaaatccgggctcaaaattattctcaagaatagcttgaccattatgctctaattgccaactggcagctgcaccttgactaatacacttcatcatcatgtcagtatcaagacctactgctcgtgcataatgaatagcttctactaccccagcgatatttccagcaatgacaatttgattggtcattttggtatgttgtcctaaaccagcttgaccaacatactgaatagattttcctaatacctgtaagataggattaactttattgaagcaatcctgattaccaccaaccataattgataatgttccatttttagctccaatgtcaccaccagaaactggggcatctaaactgcttagatgttttgcttttgcatcttgataaattttttgagcaagagcaggtgaagatgttgtaaagtctattaatattgtgttttctttggcgtgatttaaaataccatcttcaccataaaaaacagcttcaacatcacttggataacctaccatagtcataataatatctttatcatgaatacaatcttttattgtatcttgccaatcaatgccttcctcaattaaatctaccactttatctttggtacgggtataaatagaaacaaaatagccagctttttttaagttcctaaccattgattttcccataacccctacaccaatgaatcctattttttccataatgttcctccttgttttcttattttaccacatttatttgagatagaaaaatctttttatgaggtatataatgaagctaggagatgagtgagatgaaaaaagtattgattttggttggcatcatagcagttggaatatgtctttatacttgtgcaacttttaagttgaaggatgattctttagaaaaaattgagactattgagaatcaatggtcaatgacttttcctaatcataagactttattatatcaaaaagatactgtagaaggatttcacagagatggaaatcaatattttgtctattctttagataaaattgattctcatgatttttcaagttttcaaaaacagccttctccaacattagaaaaccatataaaatcattatggcatgatgatggtttagatgaaacagtgcagccagattttaatgatgattatacttattacatagtttcaaaagatgaatttaatcatttatatgttttactttttgaaaatcaaaagaaactttatattattcatgaaaaaatttgagaaatacataggaaaatcttgacatttcctctattatccatataataacaagtgcggctatctctaggatataagagtcctcgacctataccttggatttggctaagttaatatataaggaggaaaacacatgttaactaaagaagaaaaaactgctattatgaaagaatatgcaagagctgaaggagatacaggttctccagaagtacaaatcgctgtattaactgctgatatcaacaaattaaatggacactttaaagttcataaaaaagactatcattcaaatagaggtcttttaaagaaaatcggtagaagaagagatttattaaaatatttaaaaaataaagatcttgatagatatacaacattagttgacaaattaggattaagaagataaaagatattcaaaaaagaatatctttttttctttattttgtttataatatatatggttttgtcaagaaaggatgtgatttgtatgttttatagtaataatgaagttcccgagccgttatcctgtttacatacaataaatatcttggaggggcaaatatggaaaagagaattgaagaattagaaaatcaaattaaagatttattgaatgataaaaaatatcatcaaataagagaattattagtagatttaaatgaagcagatattgctgaaattattgaaaccattgataataaagaagatgttgtacgtatttttaggttattgcctaaagatagtgcagcggatgttttttcttatatcccagttgaatatgaacaaatgattattgagtcattaaccaatcgtgaaattggtcaaattatgaatgatctttattctgatgatgcggttgatatgttagaagaaatgccagcaaatgtcgttaaaaaagtattagcggcaacggataaagaaactcgtagagatattaacagtttattgaaatacccagaagattctgcgggaagtattatgacggttgagtatgttgatttacgtgcttatatgagtgtatctgatgcgattgatcgtattcgtcaaacgggtgttgataaagaaacaatcaatacttgttatgtgacagatgcacaaaagcatctgttagggattgtaactttaagagaaatcattttagcaaaaactgatgagaatattaaagacttaatgactgaaaatgttattacttttcatactttagatgatcaagaagaagttgctaaacaattccaaaaatatgattttggagcgatgcctgttgttgataatgaaaatcgtttggttggaattattacggttgatgatgttatggatatcttagaagaagaagcaactgaagatatcgaaatgatggcagccattactccaacagatcaaccttacatgaaaacaagtgtttttgatacatataaaaaacgtattccttggttattgttgttgatgatttcagcatcaattactggaaaaattattcaaggttttgaaactgctttatcgacatatgtaattttaactgcttttattccaatgttgatggatacaggaggaaattgtggttcacaagcttcagtttcggttattcgtgctttgtcattggatgaagtggaatttaaagaattaccacttgttgtatggaaagaaatgaaagtatctattctggtaggtgccactttagcaattgctaattttgctaaaatcatgttgattgatcaaacatcaatgctggttgcttttgttgtttgtatgactttgtttgtaactgtcgttgtagcaaaatttgttggttgtactttaccgattttagctgataaaattggttttgatcctgcagttatggcaagtccatttattaccactattgttgatgctttatcattacttgtttattttaatgtggcaggagcatttttagggatttagaaaagaggaaaacaatgaatatccgttatgcaataaaaaaagattatttaggtgttgaaaatattatgcagcaagtccaaacaatgcatgtcttttggagtcctgatatttatcaaaaggtagatatagctatgcctaaagaaacatttgagacacttgtttttcaaaaacaattaatagtagctgaagatgagaatcatcaaatattgggtattgtttcttttgaagaaaaacaaaagcaagccatacatcttgtgaaaagaaatattatttatatccatgtcatagctattgatgaaaaatatcgtggtcagggaattggtagtcaattgcttgattttatgaaaaagatggctaaagataaacattatgatgggttggagttatcggtgaatgtacacaatcaaaaagcaaaatcaatgtatgaaaattatggatttgaagaaaaatcaattcatatgaatttaaagttataatgtttatgaagggagattgtgatgcttgattcaatatatttatcatggttaggaattatttatcttattatgctttttattcctaatttcttttggacaaagtatcaacctcttggttatgatgcaaagtcagagaatctaattttattaatcctagaaagaataggtcaaggactggtgacttgttttgccataataagttttcaaaaaataatttggcaatgggatattttattgatcattgcaacaatagctatgtttttgtatgaaggttattggatacgttatttccatagtgattgtactttgcaagatttttatacttcgtttttaaagattcctctagctggagcaactttaccagttttagcttttttgtgtttaggaatctatgaaagacatatcttgcttgttatttctacaattattttaggaatcggacatataggaatacattatgaacattttcgaaagataaatgcttgatttcgaagatgtttttttgtttttttcttgattttaggaatatatcaaaaataaatagtttgttattgggataaattatgctataataacaaagataataaatgaggtggaaatataatatgtcaaaacaagtgtttagcttagaattttatggaaagacattaactgttgaaacaggtgaacttgccaaacaagccaatggctcagtattggttagatatgatgatacagttattttgtcaacagcagttgctgggaaagaaccaaaagatgtggactttttcccattaacagttacatatgaagaaaaattatattctgtaggaaaaattcctggaggattcttaaaaagagaagggcgtcctagcgaacatggaacattaacggctcgtatgattgaccgtccaattcgtccattgtttgctgatggatttagaaatgaagtgcaagtggtgaatactgttttatcagtagatcaagaagcatcaccagagatggcagcaatgtttggtgcatctcttgcgttatgtttatctgatattccttttaatggaccaattgctggtgtcaatgttggtttaattgatggtgaatttacaatcaatgctggtccagaagatatggaaagaagtttaattaatcttgaagttgctggaacaaaagaagcaattaacatggttgaagctgatgctaaagaagttgatgaagaaacaatgttaaatgctttaatgtttggtcatgaaaagattaaagaattaattgctttccaagaaaaagttgttgaagcatgtggtaaggaaaaaattgaaattcctttatttgaattagatcctgcaattgtagaagaagtagaagctttagcaaaagaaaaaatgattgcggctgtttctattcctggaaaattagaaagatatggtgctattgatgatatcaatgccgaagttgttgcgctttttgaagaaagagattatgcagatttaaaagaacatgattcagtcattaaacaagtgaagattgttttacatgacttagaaaaagatgaagtcagaagattaattactgaagataagattagaccagatggaagaaaaattgatgaagtgcgtccattaaatgcacaagttgatttattaccaagagttcatggttcagctttatttacccgtggtgaaacacaagttttatcagtgtgtacattaggagctttaggtgaacatcaaaaaattgatggtttaggtttagaagatcaaaaacgttttatgcatcactataacttcccaccatattcagttggtgaaacaggaagaatgggtgcgcctggacgtcgtgaaattggacatggggccttaggagaaagagctttggctcaagtgattcctagtgaagatgaattcccatatacaattcgtgttgtttctgaagttttagaatctaatggttcttcttcacaagcttctatctgtgcatcatcaatggctttaatgagtgctggtgttcctattagcaatccagttagtggtgtggctatgggattagtaaaaaaaggtgacgattatacaattttaactgatatccaagggatggaagatcatttaggtgatatggactttaaagttgcaggtacaaaaaatggtatttgtgctttacaaatggatattaaaattgatggtatcacaaaagaaattttacaagaagctttagcacaagccaaaattggtagacaacaaattatggattgtatgttaggggccattcaagaacctagaaaagaattaagcccatatgctccaaaagtctttatgatgagaattaatcctgatcaaattaaagatgttattggaccaggtggtaaaaatattaatgaaattattgaaaaatctaatgatgtcaagattgatattgaacaagatggtcgtgtgacaatttatcactttgatcaagatgctattaatactgcagctaaattaatcgaaaatatcgtgaaaaaagctgaagttggtgaaatctatgatggtaaagttgttcgtgttgaagataaatttgcttttgttgaattattcgaaggaacaaatggattcttacatgtaggtgatgttgctcatgaaagaatcaataaagtatctgatgtcttaaaactaggagatactgttaaagttaaagttacaaaaatcacagataaaggtgttaatgtttcaagaaaggctttgttgccaaaaccagttcaaccaaaggaagaaaaaacaagtgaataaaattatcttggcttcgacttcgccaagacgaaaagaattattagaaagtacgggcatcgattttataatcgatgcttcttctatagaagaagtcatggatgaaacattacctttatcattaagattacaaaaactagcaactgataaagcttatccaattcatcaaaaatatcctcatgatattgttattggtgcggatacaattgtttatttagatgatgaaatcatcggaaaagcccgtgatgaagcacatgctcgtgagattttaatgaaacttaatcatcgtaaacatagtgtttatagtgctgtggctatctattttggtgaagaacttgtgacatttgtagaaaaaacagatgtttattttaaagatataacaaatatgattgatgattatcttgcttcaaaggaatggatgggtaaagcgggagcttatggaattcaaggacgtgctgattgttttgttgatcatgttgatggtgataaaaacaatgttattggattacctctttcaaaagttatggaagtcttaaaacaacatatttcatttgaaaatctcactttatagtgagattttttggttggtatatgagtaaactgcaatgataagtgatagattcattttttattgatgaatcgaagataatttttaaaaataagataaagagggtgagatattaagaaaaaatggtggttttatatttttagatatcttgtgtttttttataaaaatatgtaaacggattcatttttatgttgtagtcttattgaaattttattataataagtgagaaggaaaaatggaggatgaaaatatggaaaagaaagttaagaggattgcattgctttctggaggtggagattgtccaggattgaatgcggtaattagaactattacaaaaactgctattcgtaaatatggttgggaagttattggatatgtttatggataccgtggtttatacaataataactatattgaattgactgaagaaaaagtagaagatatttataaagaaggaggaactattttatatagttctaataaagataacctttttgattatttagttgatgatggaaaaggtggtaaagtaaagaaagatgtcagtgatgttggagttgaaaacttaaagaaagctggcgttgatgttttggttgttttaggtggagatggtacattaacaagtgcaagagatttctctagaaaaggagttaatgtcatcggggtgcctaaaactatggacaacgatttaacaagtacagatttaacttatggatttattagtgctatgagtgttggaactgattttattgatcgtttacaaacaacagcaaaatctcatcatcgtgttatctgctgtgaattgatggggagagatgctggatggattgctttatattcaggacttgctgggaatgctggtgtttgcttgatccctgaaattcctttcacaattgaaaacattgcaaaacatgttgctaaacgtgatgcagaaggattgccttatactgttattgctgtagcagaaggagctaaatatgctgatggaacaaaagttattggtaaaatcgttgaagattcaccagacccagttcgttatagtggtttagctgctaaagttgctgatgatttagaaaaagtgattccaaatcatgaagtgcgtgctgttaatccaggacatattattcgtggtggagatattacagcatatgatcgtatcttatcaattcgttttggagtgaaagcttgtgaattaattgatgaaggtttatttggtaatgttgttacccttcatggtgaagatatggattatacttctttagaagaagttattggtgatgcaaaattcggtaaacaaaaacgtgttgatcctaatggtgaattggtacgtgctgctaaagctattggtgtttgcttcggagatgaataagatgaaaaaagtcatgaaaatggcttttttatttgcttatattttttttctttgatagaatgaggattgctagttaaaggaggacgaagaatgattgatgaattaatacaaagtggtgaatataatcaggcactttctttattgaatgacatgaatgatgagaatacccgttatttaagattggtttgtttagttggtctacaagaatatcaacaagctaaattagaaggtgcgctagccaaagcgaaagctgaagaaacatattatgatgttgtttcgatgtatgttacaacacttaaagaattgggtgaatttgaagaagcaattaatattttaattgaggaattatcaatgccttacattccttatcaatatgagatgctttttaatacggcatatgatgaaattctattagaaaaacaagaagctcattatgaacttgaatctaagaatcaaatcttttcaattgaagaaattgaacaagttttaaagaaaaaagattgtaatgaagatttgttatatatggttttagatcaactacaacaattaaatgtacgtatgatcattccaacaattaaagactatttattggatagtcgtcgtcatttctttgctaaaactttattaatagaaattatgattgatcaacaagttgatgaagatatggaagtagagaagtttggggcgtattatcatattaatccaagttatatgccacttgttttagctcaagatgtttatcaaggaattggacagtatttagaaaatgcacttgaaaatgataatccaaccatgtttgaacaatgtatggattatctagaatattttctatatgcttattatcctaaagaaatatatgatgatgagtataatgttgtagcagcttcaattcattattatgttgcgactttacaatcttatgatatagatatgtctgatttagaagtgacatattattgtgatgaatcacaaattcaaggggttgttcttttgttaaaacagattgaagtctagtaaaacatagggaaagtattgataaataaaggatattatggtatatttattaagctatttatctattagaatagaaatggattgccaaaaagtagataaatatagaaaagcatgaagtacataaatgaaatagatttttagcactcttacaataagagtgttaaaatagttgcaatcttatatttattcatgtataatatgcgtgttgaaataatggaggaagtataaatggaaacagtttgtaacaaacttgaaaattgtatggtggaagtcaaagtgactttcacaactgaagaatggaaagatgcacaagacaaagcattaaacaaattagcaaaaaatgtaaaaattgatggatttagacaagggaaagcgcctgctaaattagttaaagcaagagttggtaaaggagctatcttagaagaagcaactgacatcattttacaaaagaattatgcaggtattttattagataatgatgtacatcctgtaggtcaaccagaagtaaaaatcgatgaattaactgaagaaactttaaaagttactgttaacgctccagttgcacctgaagtgactttaggacaatataaaggattagaagttaaaaaaggacaagttaaagtaactaaaaaagaaatcgaagctgaattaaagaactatcaaaatcaatttgctgaattagtgattaaagaagaaggaactgttgaaaacggagatactgcagttatcgattttgaaggatttaaagatggagaagctttcgaaggtggaaaaggtgaaaactatccattagaaattggatctggttcttttattcctggatttgaagaacaattagtaggtatgggtattgatgaagaaaaagaaattaatgtaactttcccagaaaactatcaagctgctgaattagctggtcaagctgttgttttcaaagttaaagttcatgaaatcaaatcaaaagttttacctgaaattgatgatgaattagcaaaagatgttaatattgatggtattgaaacattagctgatttagaaacttatacaaaagaacaaattaaaaacagaaaacaaagtgaagttgaatcaaaattcagtgatgatatcttcaatgcagttattgaaaatacaccattagaagtaccagaagttatggttgaaactgaagttcaacaaatgttaagagaagtagaacaaaacttatctcaacaaggtttaaatatggaattattccaacaattaactggtaagactatggatgatatgaaagctgaaatgagagaacaagctgaaaaacgtgtaaaatttaacttaattttagctgaaattgtaaaagctgaaaatattgaagtgtctgaagaagaagttgatgaagaaatcaaagaaatcgctacatactatagcagagaatttgatgaagttaaaaaattatttgaaagtcaattaggacaaatcaaatctgatttagcaactcgtaaggctgttcaattaattaaagataacgtaaaataagacgcacttgcgtcttgttttattaagacgttttgatagacaaatgactcattattatatataatgatgaaaatggatggattgatgattcatctttgtaaaggaggtaatgaattatggaagaattagaaattgttgttgatttacctgtcatttgcacaaggggaatgattgttttccctaaacatgaaatttctttagatgttggaagaagttttagtttaaaagcaatagaaaaaagtatcaatgagtttgatgaaaatatagtttttatttctcaaaagaatccaattgatgaaaatacagattttgaacatgtttatcactatggaactttatgtaaagtgaaaagaagaattaaaagagataatcatggaacaattaaattaactgttgaaggtcaaaagcgagtagaaattactcaattagaagaaagagatggatgtttatttgccaaaacaaaatatcttgaagatattcctggtgaaaaaactgaagaaattgcattggtacgtaaagtttctgaacaaatgcaatctatgaataagaacttacaaatgtttccacgtgaagttttctcaaacttatcacaaggtatgagtgcaagtgatttggctgatacaattggtcaatatatcaatgttgaattacaaacaaaacaaaaaatcttagctgaatgtgatattaataaacgtttacttcttgttttaggtagtatggaagaagaaaaagtgattaatgaacttgaagaaaagattaatttaaaagtgaaagaaagcattgatgaaaatcaaaaagaatattatctaagagaaaagttacgtgcaattaaagaagaattaggggatacgcctaataaagaagatgatacagattatattcgtcaagaaatgaaggataaaccttatccacaatatattaaagataagattgaagaagaattaagacgttatgatatgatgccttcagcatcttctgaagccaatgttgtgagaacatatattgattgggtattaaagacgccttggtatcaagaaactgaggataatcaaaatattggtgatgttgaaagaatcttagatgaagatcattatggtttaaagaaaacaaaagaaagaattgtagaacatcttgctgtaaaacaaatgacacaatctttaaatgcgccaattatctgtttggttgggccaccaggggttgggaaaacatcgatttctaaatcgattgctagagcattaggtagaaaatttgtaaaagcatcattaggtggtgttaaggatgaagctgagattcgtggacatcgtcgaacttatttaggttctatgccaggaagaattattcaaggaatgaaaaaagctggcgttgtcaatcctgtattcttattagatgaaattgataagatgtctagtgattataaaggggatccaacaagtgcaatgcttgaagtcttagatccagaacaaaatcaattcttctcagataactacttagaagaaccttatgatttatctaaagttttatttattgcgactgctaatgatttaggaagtattcctgaaccattaagagatcgtcttgaaattattgaaatttcttcttatactgaacaagaaaaattacaaattgctaaacgtcatcttttaaagaaagaattagaaagacatggtttaaaagctgaacaattaatgattagtgatgaaacaatgatgtcaatcattcgtcattacacacgtgaagcaggagttcgtcaattagaaagattgattgctcaaatttgtcgtaaatcagttttaaagattttaaagaatccaggacttgttttagatattcaaattactgatttagaagaattcttaggtaaagcaccatttgaacatacaaagaaattagataaaccacaaattggagtggtaactggaatggcatatactcaatatggtggagatattttaccaattgaagtcaatcattttaatggaagtggtaaatttattattactggtcaattaggtgatgtgatgaaagaatctgcgtctattgctttagattatatgaaagcaaatcgtgaaaaatatggattagaaaatattgcttttgataaagaagatattcatatccatgttcctgaaggagcagtgaaaaaagatggaccaagtgcgggtgtgactttgacaactgcaattctatctgcatttagtaatcgtcctgttcgtgatgatgttgcgatgactggagaaatcactttaagaggtcaggttttaccaattggtgggttaaaagagaaatctatttctgctcatcgtagtggtattcgtacaattattattcctaaagataatgaaaaggatattgatgatattcctgaatcagttcaaaaggatttaaaaattgttttagctgatcatattgatacagtattagaaaatgcattagtaaagtagagtcttgatgactctatttttcttatagttatttgttaagaaatatgttaagatggattcaacaaggaataaaggagaatattatgtataaagtcaataaagcacaatttgtattatgtgcagcctggaaatcacagtggccagaaaatgatttgcctgaaatttgtttggctggacgtagtaatgtagggaaatcaagtttgattaatacaataacaaatcatagtaaattagcaaaagtgtcagggacaccgggaaaaacacgtactttgaatttctttaatattaatgatgagttaagattagtcgatgtgccgggctatggatatgctaaggtcaatgataaaattaaagaaagttttggagatatgattgatacttatttaagagaacgtgatgttttaaaaggattggtattaattgttgactatcgtcataaaccaacgcgtgatgatattgaaatgtatgagtatgcaaagtattatgaaattccagttattgttgtggcaacgaaagaagataaattaaaacgtaatgatttaaagaaaaatgaaaaaatgattaaacaagttttggattttgatgaaaatgatcaatttgttagattttcaagttttaacaaaactgggattcaagaactttggtatgcaattttgaagctttgttaaattaaaacttaacaaaaggcaatgtttgttgtataatcactagcagggggtaatagtcatgataaatattatgttatgttgtgcatctgggatgtcaacaagtttattagtagaaaaaatgaagaaggctgctgcagaagaaggggtagaagtgaatatctgggcagttggagctaatgaagtgaaagcaaatgctacaaaagctgatattattttacttggaccacaagtcagatatgcgcaaaagaaaattgaatctgaagcgccaggtgttccagtggcaaatattggaatgcgtgaatatggtatgatgaatggtaaggctgttttggctcaagctattgaattatgtaaaaagtaagaagtagaaatacttctttttttcatattctgtatttttttgcatacagtttgttaggagggaaagtatgcaaaaaatatattttaaaaaaattgtggacttgaatcatcgtttgaaggagcttgtatctatttctgttgatgaatcaatcagttataaaatggaaactcaaggtatgagagccgttggaagtattatgattaatggtgagtataaagatgacaataccaaacaaagttttcatgaaacgattgatttagatatcttagctcaatttgacaagattacagataaacgtgattttcatgtgaaagttgaagattttgattatacacttaatgaaggaaatatggcattggttatccaagcttgtgtatatggtgttttagatgatgaagatcgtgtcattgaaacttcacagattgttagtgatgaagttcaaagtgatgaagatgttgctttagaaattgaaaatcttttaagggaagaagatgaggtcataatgacaccacctgtggaagaaccgatattagagctcgatgaagaaattattgtaccgcaaaaagaaacaaaagaagtcataacaaagccaaacaatgaggatgaggaagatgatgaagatattggtacttattacttatatgttgtatctgatggagatagttaccaatccatagccgctcgttatcaagttgatgagtatcagctcaaagaatacaaccatgatcgtccgctttccaaaggtgcgattgtgattgtaccttattatgcatgaaagaacagcttgaggaatattatggaattcatgtgattggacaaatcacattaagtcaaaaaacatataagttaaaatgtattgaaggttattatgtattaaaatgtgtaaaagataagcatgtacaaagaaccttagaatatattgaaacattgcatatgacttgttttgtgcatgttttattaaataaaaataatgagtatgtcacaccctatcagcaacattatatttatttaatgccctatattgataattcacagggacaattaaaagaaatgaaaataaagttttactttgaaaccttagcttatcttcattaccatagtttttattatacaaaagtcaatcaacaatattttgaaacattacaacatgatatcattacaatcatcaatgaacgttttgcatattatgaacaaatgattcaaaattttgaaaacatcatgatgcgttcacctagtcaatggatgttagtgatgaactattatcgcatttatgaagctttatgtagtgctagacaatatttgtcgcaatatttagaaaaaacgaaagaatatcatcaaattagagtttgtatgaattataagcattttgattatgatcatatttctttaaaagaaaaatgtttcttatcaattgataatgtctgtatagatttaccaatctatgatttatttgatatttatcaaagaattcctgatattttatttgatttagattgttttagtgaatattatttaaaaaagattgaattaaaagatgatgaaaaattgttattgtgttgtttgatgaatattgttcctttaattgattatggacaagatgaaatcgaaaatattatcaaactctcacgattattatattatttagattctatcacccattttattcatcaattgtaattgacaagacatggtagctttgttaaaataaggatacgttgatgaggaggagtacatcttgtattcttaaagagagtctctggaaggtgtaaagagatagaagaaaagatggaaggtagcctcggagtatgttttttgaactcacagtaggaaaacacgtagaactgcgttaaagtttaagaggtatacaaatgtatacgaattaaggtggtaccacgaacattcgtccttaaacgaatgttcttttttatttgaaggaggaaaaattatgagttggaagattttattggtttgggtattgtttattgcagctttgatgtttttaagctatttctttactaaacgtgtcaaaatgaataaagaaataagaaaacaaatccaggctgaagaagcagcaagaaaacaaaaatatacataccttaaacctggtatttttgatgaatgtccaagagaggatgtttctgcagctgcattatttcattgtataagaaaagaagatgaggattttgatcactactttgaaaatatgaatgaaagtgaaaaagttgtttatggaatttatcaagttggtttaacattacaaggacaaggggcttctttacacagtttctttttaagcccatcaacaaaaccatttgttcctattattgttgatatttttgaaaaagttggatcacatgaattggctgatttaatgcgtgcagcaagacgttttgctgaaattattgaaaatgatgaagatgatgatgaagatgatccagaaatgggagattattcacgttataacttttctgattttactaatgaatttgcaactttagtaagtacaactaatttaaatgaaaaaattacaaactttattttagatcataaagaagatttctatgataaatatattcctgaaaaaaatgaagaaaatggagttgatgaagatgaaggaactagcaactaaatatgatcataagaaagtagaagaaggaaaatataagacttggattgataagaaatattttgaagcaggagatatttctaaaaagccatatagtattgttattccaccacctaatgttacaggaaaattacatttagggcatgcttgggatacaacattacaagatatgattattcgttataagagaatgcagggatatgatgctttatggttacctggaatggatcatgctggaattgcaacacaagcaaaagttgaagcaagaatgcgtgaagaagggatttcacgttatgatttaggacgtgaaaaattcttagaaaaagcttggtcttggaaagaagaatatgcttctattattcgaagtcaatgggaaaaattaggtttatcacttgattattcaaaagaaagatttactttggatgagggattaagtgaagctgttaaaactgtattcgtgacgctttatgaaaaaggtttgatttatcaaggtgaacgtattattaactgggatcctgtacaaagaacagctttatcaaatattgaagttattcataaagaaattgaaggacatatgtattatttcaaatacaaagttgtggaaacagatgaaactttagtcattgctacaacacgtccagaaacaatgtttgctgaccaagcgatctttgttcatccagatgatgaaagatatacacatttaataggaaaacatgcaattaatccggctaatggtgaagctttaccaattatggctgatagttatattgatatgagctttggaaccgcagttatgaaatgtactcctgcacatgatccaaatgactttgccctagcaaagaaatacaatttaaaaatgccaatttgtatgaatgatgatggtacaatgaacgctatgtgcggtaaatatgctggaatggatcgttttgtatgtcgtgaagctttggttaaagattttgaggatgctggagtggttgatcatattgaaacacatatgcatcaagttggacattctgaacgaagcaatgcgattgttgaaccatatttatcaaaacaatggtttgttaaaatgaaaccattggctgaagcagctttagctaatcaacaaactgattcaaaagtcaattttgttcctggacgttttgagaaaacatttaatcaatggatggaaaatattgaagattggtgtatttcacgtcaattatggtggggacatcaagtacctgcttggtatcacaaagaaactggagaagtttatgttggtaagaatccacccgctgatatagaaaattggaaacaagatgaagatgtcttagatacatggttttcaagtgctttatggccattttcaacaatgggttggccaaatactgatagcgaattatttcaacgctatttcccaacaaatacattagttacaggatatgatatcattttcttctgggtatctcgtatgattttccaatcattagaatttacgcaagaaagaccttttaaagatgttttgattcatggtttaattcgtgatgaacaaggaagaaaaatgtctaaatctttaggtaatggggttgatccaatggatgttattgatgaatatggtgctgatacacttcgtttcttcttaacaactaattcagctccaggaatggatttaagatatattccagaaaaacttgaagcatcatggaatttcattaataagatttggaactctgcacgttttgttttaatgaatattgatgaagatatgaaatatgaagatttaagttttgattatttgaatttatctgatcaatggattttaaatcgtttgaatgaggttattgtatctgttgatgaaaatatggataaatttgagtttgttaatgttggaagtgaattgtataattttatttgggatgatttctgttcatggtatattgaattatctaaagttcatttaaatagtgaaaatgcaaatgaaaaacaagcaacccaaaatactttggtttatgttttaaatgcgattgttagattattacatccatttatgccatttgtgactgaagaaatttatcaaacaattcctcatttagaagaatctatctgtatttcatcttggccacaagtaaatcatgaatttgataatcaaacaattaatgatcaattccaatatttaattgatattattaaaggaatcagaaatatgcgtgctcaatatgttattaaaaatgcgattgaagttgcttatagtatgcaaacaaaagatagtgcattagaagcattattaaaagatttagcaccatatatctataaattatgtcatgcgcgttgcattggttataatgtagaaacatcacaaaatgtagcgactgaaatgatcaaaggtggaaatgcgttgattattgaacttggtgattatattgatttggcagctgaaaagaaaaaattagaagctgaacttcaaaaattggctggcgaaattaaacgttgtgaaggtatgctttcaaatcctaacttcgttaataaagcaccagctagtaaagtagaggcagaaaaagaaaaattggctgattatcaatctaaatatgaagctgttcaaacaaaattagggaatatgtaaaaagtgaaataaaaaaatttcactttttttcatttttgacaagaaaaattgatacaaagaagcgtatatataagtaggggctacttttgaaaggaagggtaattatgaaagaattaacattacaagaacaatatgagattcaaggtgggtcattggttggaacagctcttttgtatttattgttaggagcaggtatttataagatttggaaatcaaagaaaggacgtatttctattccaagacttattaatattgaatggcgtaattaaatgtgaaaggctttatgcctttcatattttttatgttatatgcatagatattaaaagaggtgatatgcgatgaagtttgaatataagattgttattatggggattcttttttcttgtttatgtatcttactttttacatatggaacgacacttggtcaaaagacgatgtatgtttatcaagtaggtatttataaagaagaaaagaataaggaagataaattggatgagttatctaagcaagggataaaaggatattgttatcaaaaggaaaatcaatattatgttttatctatgattagtgaaaatcgtcaagaaattgatactcatgccagtcaagttaaaggtattttaaagacttataaagtatctaaagatacaactatagatattttactgcaaaatttagctaaaggagttacacatgattaaatcattaccaaaagaagaaaatcctagagaaaaggcattgaattatggcattgagtcattgagtaatgttgaattattagctttggttttaagaacaggaaacaaagaagaatcagttattcaattggctcaaagattattaaatgaagtaggtgggtttgaaagattgaatgatatttcctatgctcaattgatatcgcttaaaggaattaagcaagctaaagcaattgaaattttaagtattcttgaaattgcaaagcgtctaaagagtagagttcaagatgcacaatctttaatgactccgtttgatatttattattatgtgaaggataaaatgatgtttttaaaacaagaacattttgttattttatgtttggataataaaaatcgggttattaaagaaaaaaccatttttattggttcgattaatatgagtgtagtgaccccaagagaggtgtttaaagaagctattcatgtgagtagtgccaagattgctttggtgcataatcatcctagcggggatgcttcaccgagtcaggaagatatttatttgacaagacagtttaaagagttgggagaaatgatgtcaattgaaatcattgatcatattgttgtagggtggcatcagttttatagtatcagtgcaacgcatctgttttatgatgatgacaaaatttaaaaaaataaattaatttgataaaatctatatctcgaattgctttttttcactccagatattataatgtactagattaggggtgatattttgtataagaaaaataacaaatggaataaacataacaaaagaattgttattgtgacaatcgttttggttcttttttcagtttttaccttagtaacaagtcgatcagcttcaggaattgaaacgatgtttaaagatacaattgccaacattgaatattatgtcattaaggcaccaatagaatatgtgagtcatctttttgatgaatacagcgatttaaaagatgtctacaatgaaaatgcgaagcttaaagaacagttagataatctagcaagagaatcagctatgaatgaaactttatccaatgaaatagaagaattaaagaagttgacaggaattgattttctaccaacagaatatcaagtgaaatacacaaatgtcattgctagagatgctgaaagctggaacaatcaagttacaattaacttaggtaatctttctggaattaaagaaggaatggcagttattagttctgatggaatgattggaacggtaacaaatgtaagtgaaatttcttcaacggtttctttattgtcaagtgaaacaagcaagagtcagttgcctgtaatgataataagtggtgatgaagaatattatggcttattgaatcgttatgatttgagtagtaaaagttatcgtattactttattgagtgatgtggaaaaactagaaaaaggggccaaggttgtaacgagcggtttaggtggtgtcggtaagagtccgaaaggtattttagtagggacagttgaaaattatactgttggagatgatgcgactgaatctgtttgtatggtaaagccaagtgtcaattttgattcattgaactatgttgctgtggttcaaagggtgaatgaaaaatgagaacaagaatgagagatagttatctttttaaatgttttgtcgtcgtttttctttgctttattatagatagtactatgggttattttttaccatataactatactaaaactggaataacgattattccatgtcttggtttaatgatgttttcattgttagttaaaacgattgatggcgcagaaagatatttctttgcagcaatatgtggtgtttattattctattgtttattcgaattctttagctatatatatacttatttattgtttaatcgcctttgttcgatcttatattgtaaaattagaaagctttagtcttattgaatcaatggttttttgttgtttgacaatatttgcgcaagaaagcgtgctatattggttgatgtggattaccaatatgacaagatatcctatttcatcatttttattgatgaggatattaccaacgctgattgtgaatttgattctatcgatgggagtttattgggtctacaataaagtgaagatcgaggtggaataatgaatattgaagtcaaaggggttaatgaaatattgatgatgaaagtcaatccccattgtttatttgaagaagttttaaatgatttaaatatgctcttggatcagcctatctttaaacaagatggctattatccaagggcatattttgattttggatgtcgacttttaaaagatgatgaattaaaaagtttgattgtgttgttaaaagcaaaaaagcgggttatttttgaaggattatctttacctaaaaaagaacatgcactttcaattcaacgtgaacaattgagaaatggtgaagaaatttatattgaaaatgaaacattatttttaggaacagttaatccaggaagttatgtttattgtcatgataacgtttattttttaaatactgttaaaggaacaattattgcgatgaatgagaatgtaaagatttatgggcatgattttcaaaaagcacaaatcataataaatcaacaatctttgcatgatttgacaacttctgcactcacaagtgtctattataaagataaccagattaaggcaatgaaggaggatggttatgagaacgattgtcattacatcaggtaagggtggtgtaggaaaaagcagtatgacgattaatataggttatgcgctggcttcatcaggtatgaaggtttgtttaatagatgcggattttggtttaaagaaccttgatgtcatgatgggacttgaaaatcgtgtgatttatgatttgaaggatgtgatttcaaataaatgctcacttaatcagatattggtaaaagataaaagaatggaatctttgtatttattaccagcatgtaaatcattatcatttgaaaatttaaatgttgattacatgacaaagatgattgaacaattaaaagaagaatttgattacatattgattgatagtccagcaggaatagaaaaaggttttcaatatgccagtggactttcccaagaagcgattattgttgtcacacttgatgttgtttctttgcgtgatgctgatcgcgtgattggcttattgttaaaacagggagtgagtcatttacatatgttagtcaataaatacaatgatgaggatattcataaaggacgtagcttaagcttaaaagatgcttatgatattttatctattcctttattagggattgtttatgatgatcatgctatgattgaagcaaacaataaaggaatgcctgtttttatggataagaatttagcagtttcaggttgttttagtcgtattgtgaagcgtttagaaggagtggaggttccatttcaaaaaaataagaaaaaacctttgttggaacgtatttttggttgagggatttcataagttgtaaagaggtgacaaacttgtgaatgaaattgatgaaatcaaaagaaggatgaaaaaaaggaaagcgtatcgtagtcctaatccaacattgacggattatcatttttcaaagctttataatgcaatgattaaatgtatggttgttttacttgttggaattgcgatatgcgcttatgtgaaagtcagtccaaatggtgaatatattaaagattatgtcttgaatgatgtacattttactgaattaacaaaatggattaatcatcagcttttatcttttcaatccaaacaagatcaaagtgtagctgttagtaatcaggtgagttatacaaatataaaagataattattatacaaatcaatcaaatgaagtattgaattttgataaaggacgagttatttatgttggtaagcaagatttacttggtcaatatgtgacggttttattagaaaataacgttgaagtgacttatggcggattaagtgatgtttttgtaggaatgtatgatcaagttgataaagctacaattattggtacttatcaaaaacaagttatgctggtttttacccaaggtgaaaaagaaattgattattcaacatttgaagaacttatttcatagattaaagattcatccattaacagttctttattttggttttgcattaataggaggatatttaaaatggtatctttcagctttaatgattgtttgtttacatgaactatgccatcttttgatggcatattattttcattttgaaattgaaaaagtagaaatcttaccttttggagcttatttatctttacatgatttttattttcattcgttaatggaagaaatgtgtgttgttttagctggaccatgtagtcatttgattatttattctatgatttgtttatgttatcaaggtgtttatcgagattatcttttattaatgaatatgtgtgtctttgggtttaatcttttgcctatctatccaatggatggttatcgcttgatcaatttattattacaaagtttgattgatttaaaaaaagcattttatttcagcttgaaactttcggtattttctttttgtatcttctttgtgttttatttaagaatcaatacgattgttattttaggatatttatttgttcaacaattttatttactcaagtttattcctgaatatttaaggcgatactatagtgaaatagcaactttgaaacccgctaaaaaggtaaaacttcatcatcatttgagttatcgtcggggttatcataactattatttattagagcatggtattaaagatgaaaaggaaatggtctttatctttttaaagaatgtaaaaaaatagaaaatatcacaatagaacttgtatttttgtcatttatatgatatcatacaacaggtatttcaaaatacacacattgtgaattcgtaaatcgagtgcctaatggtggtttatgttagaaacaatggaggaaaaaaacgaaaaggaggaagttacaatggcagtaatttcaatgaaaaaattattagaagttggtgttcatttcggacatcaaacaaaaagatggaatccaaaaatggctccatacattttcacagcaagaaatggtatttacatcatcgatttaaagaaatcatctgataaaattgatgaagcttatgcagctatgatggatatcgttgctaaaggtggaaaagttttatttgtaggaactaaaaaacaagctcaagaagctgtacaaatggaagctgaaagatctggaagtttctatgttaattctcgttggttaggaggaactttaacaaacttcaaaactattcaaaagagaattagaagattaaaagaattagaaaaaatggaagaagatggaactttagaattgttcactaagaaagaagcagttcttatgatgaaagaaaaagctaagttagaaaagaacttaggtggtatcaaagaaatgagaagattaccaaatgctttattcgtagttgatcctaaagttgaacataatgcagtagcagaagctaaaatcttaggtatccctgtatttggtatcgttgatacaaactgtgatcctgatgaagttgattatgttatcccagctaatgatgatgctattagagcagtaaaattaatcgttgctgctatggctgatgctgtatgtgaagcaaaaggtgaacctgtaactgttgcatacgttaaagatgaagatgacaaagaagtatctatgaatgatgctgttgcttctgtagaagaaagtaaacaaagaggaccaagatacaaaaataacggacgtccaagaaataacaaacctgctgaagtaagcaaaccagctgaagttaaagaagaaaaaactgaagcatagttgtaataaggggaggcttatgtctttcccttttttataaaaaatattaatggaggatagagagaaatggctattagtgcaaaattagtaaaagaattacgtgaaaaaactggtgctggaatgatggattgtaaaaaagcattagaagcttgtgatggtgacttagaagcatcatttgactggttaagagaaaaaggaattgcaaaagctgctaaaaaagctgaccgtatcgctgctgaagggttaactgcttttgttatggatggaaatgctgctgcaatcgttgaagtgaactctgaaactgacttcgttgctaaaaatgctgaattccaagaattagtagcaaatgttgctgcaattattgtaaaaaatcaaccagctgatttagaagctgcattaaaattagatgtagatggtaaagatttagaaacagttatcgctgaaaagagtggtaaaattggtgaaaaattaagcttaagaagattcgttgttatgaataaagctgatgatgaagttttcggtgcttattcacatatgggtggaaaaatgtctgccttagtaaaagcatcaggaattgatgaaacaaaagcaaaagatgttgctatgcaagttgctgctattaatccacaatatattgatagaagtgcaattcctgctgaagttttagatcgtgaattaacagttttaaaagctcaagcaatggaagaaaatgcaaatgctgctaaacctaaaccagaaaacattattgaaaaaatggttcaaggtcgtttgaataaaaatttacaagaaatttgcttagttgatcaagcatttattaaagattctgatttaacagttgctaaatacttaggaaacggaaaagtattagaaatggttcgtttcgaagttggtgaaggaatggaaaaaagagaagaaaactttgctgaagaagtagctgctcaaatgaaaggataattatatacgggggaggacactttttgtgcccttttcttgtaaaatgaaggagaacgtatgaagtacaagagagtattattaaagcttagtggagaagctttagccggggaacaaggttttggaattaatcctgttgttgttgccgatgtagcaagacaaattaaagatgcaaaagatttaggtgttgaaattgccattgtttgtggtggtggaaatatctggcgtggtaagactggtagcgatatgggtatggaaagagctgctgctgattacatggggatgctagcaactgtcatgaatggtatggccttacaaaatgctttagaagcgattggtttagatacaagattattatctgcaatcgatatgaaagaagttgctgaaccatatattcgtagacgtgctgttcgtcatttggaaaaaggacgtattgttatttttggtgctggtactggtagcccattctttacaacagatacaactgctgctttacgtgctgctgaaatgaatgcagatgttattttaatggctaaaaatggtgttgatggtgtttattcagctgatcctaagattgatcctcaagcgaaaaaatatgatcacatcacatatttagatgtattaaatgaagatttacatatcatggatcaaactgcaattactttatgcaaggataatggtattgatttatgtgtattcaacatgcaagaagatggtaatattgcacgtgcttgtgatggtgaatcaattggaacaattatttcaaaaggaggagaatagacatgttagatttgattttagaagaaacaaaagaaagaatggaaaaatctatcgaagcttttcgtcatgaattagcaactgtaagaactggacgtgcgaatccaacaatgttagatcgtgttatggtaaattactatggtgaaaagacaccattaaatcaaacagctggtatttctgttgttgaaggtcgtcaattattaattaaaccttatgataaaaattctttaaaagatattgaacatgctatctatgaatcaggaattggcttgacacctcaaaatgatggtgaagttattcgtatcaatgttcctgctttaacagaagaaacaagaaaagaatatgttaaacaagcaaaaaaatatgctgaagaagcaaaagtagctttacgtaatattagaagaacttctaatactgaagttgaaaaagctggtttaactgaagatgaagaaaaacaaggtaaagaacaaattcaaaaattaactgatgaatttgtaaaaaagattgatcaattaacaaaagaaaaagaaacagatttaatgacagtttaatatgtttgagggatatcaaaagggatatcccttttttcatacatctttttctttttgttttcaatacttgttgtttatggtataatacaaaatgattatgaggtgagaacatgttttttaacaaaaagaaaaaagaagattatgatttagatatggataatattcctgctcatattgcttttattatggatggtaatggacgatgggcaaagaaaagaaagatgcctagaacttatggacatcatgaaggaacgaaaactatccgtactttggctttagaagctaatcgtttaggggtgaaggcaatgactgtttatgctttttcaactgaaaattttaaacgtgaagcaagtgaagttgaatatatttttaagttacctaaagaattttttaatctttatttaaaagaattaatggataacaatgttcaaattcgttatattggtcatttagaaatggcaccaaaagaaactcaggatattattcaggcagctattgatcaaacggctaataatacaggattaattttaacttttgcttttatttatggtggtcgtgatgaaattgttgagacaacaaaagaaatttgcgaaaagtataaaaatggtgaaatatctttagatgatattaatgaagattattttgaaaagcatttaatgacaaaagatttaccacctgttgatttgatggttagaagtagtggtgaatgtcgtttatctaattttttaccttggcagttggcttatgctgagtttatctttgatgagacattatggcctgattttgatgaggaacatcttcatcgggcaattgcaatatatcagggaagggaacgtagatttggaggtgtaattcaatgaaaacaagaattataacaggaattgtattggttttggttattttaccttgtgttattattgggcaaattccttttcaagttcttttagcacttgttgcaggagctggaatttttgagatgctttctatttgtgatcgaccaaaagctaatatttatctttatccacttgttggaatctttgtttattattctttatttttagatcaatctttgatgattcctacggaaatcattgtattatatttaattgttttattggcttgtagtatgtttgatgatggtatgaattttttaagattgtgctattattttacagcaggtgttttaattgctatggggttacatatgctttatcaattgcgtttaacatatggatttagttatattcttttattagctctagcaacttttggaaccgatacaggagcttattttagtggtatgatgtttggtaaacataaattaaatccgagattatctcctaaaaagacaattgaaggttcaattggaggaatgttattagggactgttctttcggttgcttatggtgcatatattcatatagagattccttttatttatttgattggtatttgttttattttgacaattacaagtcaaattggtgatttgacttttagtagtattaagcgagtatttgaagtgaaagattattcacagttattacctggacatggtggagttttagatcgttttgattcgattttatttaatgctatggtgtttggaattttacttcgatttttagcaatggtggtgatgtaatatgaagaaaattactgttttaggagttacggggtcgattggaacacagacagttgatgttgttaaacatcatcgtgaagaatttgaaattattgcgatgagtgctggaagaaatattgagttgttagaaaaaatcatggtttctgtgcatgttcgtcatatttgtgttcaaaataaagaagataaggaatatttggaaaacaaatataaagattgttatttttattatggtcaagaaggtcttattactattgcaacccttcctgaagttgatgttgtcttaaatgcaattgttggctttgctggtttattacctacaatggaagccattaaagctcataaagatattgctttagctaataaagaaacattggttgtggcaggacatttaatcattcctttggttaaagaatatggtgttgcattattacctgtagatagtgaacattcagcgatttttcaatctatgaatggagaacatcatggtgatatttctaaaattattttaacagcaagtggtggaagttttagagataagtcacgtgaagaattaaaaaatgtgacggttgaacaagctttaaaacatccaaattggtcaatgggagcaaagattacaattgatagtgcgacattgttcaataaaggtttagaagttatggaagcaaaatggttgtttgatgttgattatgatgatattgaagttttaattcaccctgaaagtattgttcattcaatggttgaatatcaagatacttcagtcattgcacaattgggaacaccagatatgcgcttgcctattcaatatgctttaacttatcctcgccgtcaacctttgattggtggaaaacgtttatcattggctgatattggaactctccatttctatgctccagattttaaacgttttaaagcgttggaattagcttatgaagcaggaagaaaaggtggttctatgccatgtgttttaaatggagctaatgaacaagcaaatgctttattcttaaatcgtaaaatctgtttcttggacattgaaagattagtagaagaagctatgcgtgctcatgaatgggtagatcatccatctttagatcaacttttagaaattgatcgatgggctagaaattatgttttaaaaagagtaggagaagatgaatgcaaacaataattaatataatcgtctttttattgattttaggttcaattattattattcacgagcttggacattttttagcagctaagttctttggggtctattgtggtcagttttcaattggatttggacctaaactttggtcaaaaaaaggcaaagaaacagaatatgaaattcgcgctttaccttttggaggatttgttgcaatggctggtgaagaagaccaggctgataatgaagatatgcaagatcttcctgttgaaagaactttaaaaggaattaaaacttatcaaaaagtcattatctttttagctggtgtctttatgaattttgttttggcttttgtggtgactttaggggtcaatgtatttgctggacaattgccagtgaatgttgctcaaattggtcaaattgaagccaattcaccagcggctcaatatggtcttgaaaaagatgatgtcattcaacaaattcaaattgttgaaacaggagaatctattttagtttcaaattttgaagatgttcatttaacacaggatactctaaaaacaaaagctaatactttaaatatgaagattacggttttaagagataatcaaaaaaaagtgatagacatgaaagtgccttataatgtagaggcaagtcgttatagtttaggtattcaacaggcaacacgtgatatgaatattgctgaagcttttcaatatacatttatttctttaaaaagcatgagtgttgcgatatttgccgcattaggtcagcttgttacaaagttttctgaaactgtgactcagttatcaggaccagcaggtatttatcaaattacagcgcaggtaactgaaacagggcaaattgcttatgtattaaatttattagctttattatctgtcaatattggaatttttaatctgatgccaattcctggtttggatggttgtcaagttctttttgcaatcgttgaaaagatgattggtagggaattaccagaaaaattaaagttaactttacaaatgattgggttaggcttggttttattattgatggtatttgtcacatatcaagatatattaagaatatttggataagggatattttatcccttttcatattgagggaggaattttatgaataaaatgttgattttattacaacaactccatttagaaaatgaagtcaacgaattaaaaagagcaactattgagaaagttgttgtcaatgctgataattcatatgtattttatattgttgcttcacatattgtgccattagaagaaataagggttctttttgctgctaaaaatgaatttccttatccttgtgattttatttttgattggatgtcatcttatactaatcaagatgtaaaagaatatgcactttttatttttaaaggtttaaagaaacgttttcctcagattgaatttttaaatcaggattctttatcttttgaagaaaatacattaaagatggaagttttaaatgaaattcaattgaatcagttacaacatttatataagatttttgataaatattttagtaagtttggaattcagattggctttgatgcttatattgatcaaaataatgaaacctatcagtctattcaagaagaaatgagtgctttaaatgaagttcaagttgatgaaaaaacttttcatcaacaagtagaatctcctgttgtcgaaaagaaagcaaagtttcaaagttataaaaaagaatatttttcattaaccattgatgaaattgatgaaactgttaaagaagttatgattcaaggatatgtctttaatgaagattctaaaaaagtcaaaacaggaaaaacaattcaatcactttatgtgacagattatacaaatagtattgttgttaagcgttttgaaaataaaggtggcaatagccttgaagaaatgaaaaaggtgaaaaaaggtggcgtatgggtcagagttaaaggaaatgttgaatatgatacatatgcaaaagatactgttataattgctagagaggttgaagtgattccttcacctaaagttcgacaagataatgcacctaaaaaacgtgtagaattacatgtccattcaaaaatgtcagcaatggatggaattggcagtatgagtgaatacatagagcgtgcggcttattggggacatcaagctattgctgtgacagatcatggtaatgttcagtctttcccagaggcccagatggctagtattaaaaataagattaagatgatttatggggttgaaatgtacatgattgaccctgaatttagtgttgtctataatgaaaaagatgtgccattaaaagatttgacctttgtttcatttgaccttgaaacaaccggactttcagtcatggatgatgatattactgaatttggtgctgtacgttataaaaacggacaggaaattggtcgtttacaaagtttaattaaacctaataaacgcatttctcaaaagattacaaatttgacccatattacaaacgaagatgtcaaagatgccccaacaattgatgaatttattccacgtattttagatttctttaaggatgatgttattgttgctcataatgcaacatttgatgttggtttcttaaatgaaatcttagtcagacatggttatcaaaaattaacgaatcctgctgtcgattctttaactttagcatggaaattactacctgaagcaaaaggttatcgtttggggaatgtagctcgtcattatcgtattgcctatgatggagaagcagcccatcgtgctgattatgatgcagaagtcttagctggtgtttttaatatgatgcttcatgatatgatgcaaaatcaaaaagacaatctattagatatgaatgcgatggaatgtgtcaatgcatataagatagtacgtccaaaacatatgtgtgtcttagctaagaataaagatggtcttaagaatatgtttaaattggtttctgaagcgaatacaacttactttgaaaagacttcacgtattcctcgtgaacgtttacaattctatcgtgaggggcttttatttgggagtgggtgttataattcagaaatctttgaacttgcaatgacgcgtagtttggaggaattaaagcaagctatttctttttatgattatattgaagttttacctttggatatttgtgattactttgtagaaagaggaagaatcgatacagaggaagatttaaaacgtattttacgtcgtattgttgatgcagctaaggaaatgggtaaaatgatagtagcaacaggggatgttcattatcttgatcaaaaagataagatttttagagatgtttttacctgcaatcctaaaattggtttaggtggtactctccatcctttaacaaaccgtagtgatccaaaagcttggacaccggatgaatatttccgtacaacggaagaaatgctcgctagtttcccttatttaacaccagaagaatgttatgaatatgttgttgaaaatacgaataagatagctgatatgattgatggtagtttccatgttgttcatgataaattatttactcctcatattgataacgcggatgaaaatttaagacaattatgttttgataatgcgcataaacaatatggtgaagttttacctgaaattgttgaaaaacgtttatcaaaagagttagataacattattaaacatggatttggggttatttattatattgctcataaattagttaagaaatctaatgaagcaggatatctggtaggaagccgtggttcagtaggatcttctttcgttgcgacaatggcgaatatttcagaagttaatcctttgcctccacattattattgtccacattgtcaatatagtgaatttttacctgatggatttatcgcaaatggatttgatttaccagataaaatttgtccaaaatgtggaaagcctttaaaaggtgatggacataatattccatttgaaacgttcttaggatttaatgcggataaagttcctgatattgatcttaacttctcaggtgattatcagccaacagcgcatgcttatacaaaagaaatctttggtgaaagtcatgtctatcgtgccggtacaatttctactgtagcagaaaaaacagcttatggttatgcaaaaggatatgctgaattaatgggtaaagaaaatagtatacgtgctgctgagctagaacgaattgctaagggatgtacgggtgttaaacgtaccacaggacagcatcctggaggaattattgttattcctgaaagcatggatgtctatgattttactccatatcaatatcctgctgatgatttgtcagctgaatggaaaacaacgcattttgacttccatgctattcatgataatgtccttaagttcgatatcttaggacatgttgatccaacagttattaggatgttacaggatttaacgggaattaacccaaaagacattccaaccaatgatccaaaagtgatgagtttatttaattctactgatgccttagggattgatttaagcttcttgaattgtaaaactggagctttaggattgcctgagtttggaacgaagtttgttcgtgggatgcttgaacaaactcatccaacgtcttttagtgatttggttatcttatcaggactttctcatgggacggatgtttacttaggaaacgccgagactttaattagctcaggaacatgtacattaaaagaagttattggatgtcgtgatgatattatggtttatttaattgaaaaaggtttaccaaataaagatgcctttgatattatggagtgtgtacgtaaaggaaaatcaccagcagttttcccagaaaagaaatatgaagaattaatgcgcaagcatgatgttccaacttggtatattgaatcatgtaagaaaattaaatacatgttcccaaaagcccatgctgctgcttatgtattaagtgcgattcgtgtggcttggtggaaactctattatccacgtgaatattatgcagtttattttacaacacgttgtgatgcttatgatattgaaactttgattcaaggaaaagaagctgttttagcaagatatcaggaaattttaagtgataaacaaaatggtgttaagatttctaataaagaagaagctttgatttcagtatttgaaattgctttagaaatgtttgaaagagatattcattttaataatatttctttagaaaattctgattcacgttgttttatattagatcctgatgacgaaagtggattattacctccatttatttcaattgatggattaggggcagccgtaggtgatagtgttgttgaagcccgcaaacaaaattctttcttatctaaggaagatgttatgaaacgtacgaaattaaccaacacacaaattgattttttgacaaaaatcggggtttttgaagatatgtctgaagaaaatcagttatctttgtttgatttgtagaaaaataatgatgaaagcattgttttttctagttgtgtgtgttatattattaatgtagtcagtgttttacgagaggggaaaccctctcgtttatatttgtaaatggaggattatatgctagaaaaaataacaagtttaattcaacctattttaagtgaacatgatgtttaccttgatgacattgaatatgtgaaagaaaagaatgaatggtatttaagaatttttattgaaaaaaatgttggtcatttagatatggatacttgcgtagctgttagtgaagcgattagtgatcaattagatgaagctgatatcatcacaaatgaatactatttagaagtatcttcaccaggtgctgaaaaaccattaaagactttagaaaaggttcaacaatctattggagaatatgtttatattgaatttaagaatccaatgtttggaatgaatgatgtttatggaacaattttaaatgttgatggggatacaattgaacttcaatatatggttaagaatataaagaaaaaatgttctattcaatatgatgatattgcattcatcagattagctgttaaattttaaggaggaaaaaagaaaaatggctagtaaaaaatttatccaagctttagagttattggaaagtgaaaagggaattcaaaaggaagttgttttagatgctttaaaagaagcattagaaaaatcatacaaaaagaattatggtggacctgaatctataattcgtgttgatatcaatgctaatacaggtaaaatccgtttatatgaaattaaacatgttgttgatgatgtgaatgatgaggactatgaattatcaattgaagaagcacaaatgattaatccaaaatatcaagttggagatgatgttgttactgaagttgatcctgaagtttttggtcgtttagcagcgattcaaacaaaacaattattaaaacaaaaaatcagagaagctgaaaaagaaacattatacaatgaatatgttgataaaaaggatgatattattactggtgttgttgatcgtgtagaagatcgttttgcgattatcaatatcggtagaactggggctttgttgccagttaatcaacaaatccctggagaaaaaatttatgaaggtcaacatattaaagtatatgtaagtgatgttgaaagaaatacgaagggaactcatattggggtttctagaactgaaccaggtttagtgaaaagattatttgaaatggaagttccagaaatttatgatggaactgttgaaattaaatctgtgtctcgtgaagctggggatcgtagtaaaattgctgtttatacaacgaatgaaaatgttgatccaattggttcatgtgttgggccaaaaggtagtcgtgtacgtaatgttgttaatgaattaaatggtgaaatgattgatattattgaatggaatgaagatccagttgtctttatttctcatgctttatctccatctgttgttgtaagtgttgatatcaatgaagaagatcatagtgctttggttattgttcctgataatcagttatcattagcaattggtaaaagaggtcaaaatgcacgattagcagtacgtttaactggatggaagattgatattaaatctgttagtgaagctgctagagaaggtattgtttatggtcaagatgctgaatttgaaaaatcatttgaagcagaaatgacgaaagaagaacctgtagaagttgaagaaccaattgttgaaaaaatcgttgtggatgtagaagaacctgaagctgtagaagattttgaagaaagctttgaagaagatacagaagttgaagaaagtgttgaagaagtcgctgatgaagaatcatttgatgatgaagaaaatgatcttgttacaagtgaagaagaatcttttgatggttatgatgatgactatgatgaagaagatgatgattatgactacgatcctaaatatgacgaagatattgactatgatgaatttgataaatattatgatgaaaaatagaggtgatttttatgaaaaaaattcctttaagaaaatgtgttgcgacaggtgagcaattacctaaaaaagaacttattcgtgttgtgagaaacaaagaaggagaagtatttgtagatccaacgggtaaaatgaatggtcgtggggcatatttaaaaagaagccttgaagcgattgaaattgctcaaaaaaagggtgttttaaaaagagcattagaagtggatattccagattctgtttatgaggaattaaaaagctatgctcaataaagatgtattgtctttgttaggacttgcaagtcgtgcgcgtttaattagtacaggagatgttttattaaaagatattcgtaataatcgtgtgtactttgttatgattgctttagatgcaagtgaaaatacaaagaagaaatttaaagataaatgttcatattatcatattgattatcaagtgataggagaagttgatgatttgtcccacgcaattgggagagataatcgtgttgttgttgggattaaagataaaggttttgcagataaaatcaaatcaaagttaggaggttgatattatggcaaaaaagaataatacaacaaaaaagaaaaggaatcagcataaaaagaaattaatttcaaatatccctaataaaaaagaagaaaagatattaggtgatggaattgttgaatatgaagatggtatcactgttggtgaattagctgagaaaattggtcaaacacctgccaatgttattaaagttttatttatgcttggaacaatggttactattaattcatctttggatgatgaacaagtggaattaatctgtcttgagtatggttatgaatcaaagaaaaaagttgttgtcagtgaaatcaattttgaagaaattgaaattgttgatgatgaagctgatttggttagtcgtccacctgttgttactatcatgggacatgttgaccatgggaaaacaacgttattggattctattcgtaaatcaaaagttgttgatggagaatttggtggaattactcaacatattggagcttaccaagttgaagttaatggaaagaaagtcactttcttagatactccaggacatgaagctttcactgctatgcgtgctcgtggagctcaggttactgatattgttattattgttgttgcagctgatgatggtgttatgccacaaacaaaagaagctgttgaccatgctttggcagctggtgttccaattgttgttgcagtaaataagattgataaagaaggtgctgatcctgaacgtattaaaggtgaaatgagtgaattaggattaatgcctgaagaatggggtggagatactgtttattgcaatatttctgctaaaaaagggattggtatttctgaattattagagacattaacagttgttgctgaattagctgatttaaaagcaaatccaaaacgttatgcatatggaagtgttgttgagggtagactagataaaggtcgtggaccagttgctacattacttgtccaaaatggaactttaagatctggtgatccaattgttgtaggtacggcttttgggcgtgttcgtcaaatgttagatgattctggacgtgatcttaaagaagctggaccatcaacacctgttgaaattactggattaaatgaagtgccagttgcgggtgataagtttatggcttttgaaactgaaaagacagctcgtcatgttggtgaagaaagacaaaaagctaaacaagaactagatcgtggtgttagttcagcaatgagtcttgatgatttatttaatcaaattaaagatggtgaagttgctgatttaaatatcattgtaaaagctgatgttaatggaactgctgaagccgttaaaggttcattagaaaaaattgatattgatggagctagagtccatgttattcgttcaactgttggtgctattagtgaatctgatgttttattagctagtgcttctaaagcaattatctatggatttaatgttcgtcctgatgctaatgttagaagaaaagctgaagaagaaggtgttgaaatcagattacacaatatcatctataagatggttgaagaaattgaagctgccatgaaaggtatgttagcacctgaaatggaagaagttgttactggacaagctgaaattagacaagttattaaggtttcaaaagttggaaatatcgctggatgttatgtaactgatggatatatccgtagagattgtggtatccgtttaattcgtgatggagttgttatttatgaaggaaaattagcttcattaaaacgattcaaagatgatgctaaagaagttgcaagcggttatgaatgtggtatgacaattgaaaactacaatgatatcaaagaaggagatattgttgaaggatatatcatggaagaagtagaaagaaagtaggagtgattcattgtggtcatgaaaaaagaaaaaatgaatggcattattcaaagagagctttctgatatattacaaactgaagtaagagatcctgctattggtttttgtacaatcactggagtagatatcacaagtgatttatcaattgctaaaatttatgtttctttcttgaataagaatactaaaaagagtatggaagcattagaaagatcaaaaggatttattcgtagtttacttgcgaaacgattaacaattcgtaagtgtcctgaacttcattttatattggatacttctttggagtatggtaataaaattgaaacaattattgaagaacttaaagaaaaataaaagataagtatttatgttttatctaataactaaaatgagtcttgtaatcattgattacaagactttatagatttataacaatggaaaatagttactgctattttccattttattatgtactgatactcataaatatagaattttataaatataatgcaaactttattgaacttataatatgaacaacatataatgaacttaagaggtatattgactgaatgagtctcaataattatgtgtgtttatcattttataattcacagaattcattagtaaaaactataggttgtggtggatatatgttttttgatgaatataaattcaaatggacaagagggagcgtgtataatatatgaaaaaagtcttgcttattgtttttatatggttgacaattttaacaggatggcttgcttatcatagtttttatcaaacagatgatgataatttgacgccaacgacaagtattcctgcatgtaatttattaggtcatttctattatagtcactatgatcgtgatgaagataaagttcatcaagttgaaaagggatttgattattatggaacaattcatgaatatgtaaagagtttggaacgtaatcaaataaatgaattaacaacaaatgcgttatattatatgaatagagatgtttatgtcaataaagatgatgatagttatatttatgtacgtatggataaagataattattcattattgtattatgatgatgccactgaaaataaagttcttaaaatcattcaagccaaccaataaaatagctttttgaattaatgaaaatgatatttgtcaatgactttattccacaactaaaaacttaatagattgataataatgggaaatggatgattgccacttcccattttctattcaattaatatatttagaatgtcttttgtcataaaatcattttacatgtttatatgtgaaataattgacaagaatacaagaatagactaaaatattgttatattgaaaagaaagagggacgaaaatgttattagagaataaagttgccattgtaactggcgggacaagaggaattggttatgcaactgtgaaagaatttttaaaacaaggagccaaagttgctttgtttggttcacgtgaagaaactgtaagagttgctttagaaaaattaagagaagaaaatccggattatcctgtgattggtttatatccaaatttaatggatgcaaatgaagttaaagaagctttccaaaaagttgttcatgaatttggacatttagatattttggtaaataatgcaggtatttcacaaagagataaaatctttgattataatattgaagattttgaaaagattatgaatttaaatgttaatgcagtttttgtatgttcaaaagaagctgcacatattatgaaagaacaaggtggaggagttatcttaaatacaagctcaatggtttctttatatggacaacctgcaggagctggatatccaacatctaaatttgctgttaatggaatgaccaaatctttagcaagagaacttggaaaagatcacattcgtgtgaacgcagtagctccaggagtcattaaaactgatatggttgcagcccttccagatgaagtgattcaaccaattattaatacaattccattaagacgtgtaggggaacctgaagatgttgctaatgcttttgttttcttagcaagtgaaatggcaagttacataactggggttgttttatcagttgatggtgcaacaatgtcgtagaattaggtatactgatgtatacctttttgtatgtattttatttgaagatgaactaataagtggtataataagcacaggaggacaaaaaaatgaaaaaatgtattgtaaacgggaaaattattttacatgatgaaattgtagaaaaaaatctttttatcgaagatgataaaattactgaaattagtgatcgtcagccaactgatgaggacgtaattgatgcgaaaggacaatatgtagcacctggatttattgatgttcatacccatggtcgtggtggtagtgatacaatgtatccaacttttgaagatttaaatacaatctcaaaagcagctttaaaaactggagttacaacattattaccaacaacaatgacgatgccagttgatgacattgctaaggcagttgaaaatattgcggtttataaagataaggttgaaggagctcaagttttagggacacatttagaaggacctttctttaataaaaaatataaaggagctcaaccagaagaatgtatgatcttaccaacagttgaaaattatttgtcatttgttaaagatcatcaagatattatcagaaagatttctatcgctcctgaattggaacattcaattgaattaattgagtacttaaatgataaaaatacagtcgtatctttaggtcatacaaatgcgacatatgaagaagcacaaaaagccattgatgcaggtgctacttcaggaacgcatacatttaatgcaatgacaccattaacacatcgtgcacctggagttgttggcgctgtaatgattaatgatagtgtttatgctgagttaatattagatggtattcatgttaattttgcagcagctcaagctttgcttcgtactaaaggaaaagataagcttattttaattactgattctattgaagcagctggattacctgatggaacatataaattagggaaccaaccagtatatgttaaaaatggtgaagcaagattagcaaatggagcattagctggaagtattgcaaatatgaatgattgcgttagaaattcttatcgtcatttaggattaactttaaatgaagcagttaaccttgcaagttataacccagctcaaagtttacatgaagatttattaggtgaaattaaagttggaaattatgctgatattattttctttgatgaagatattcgtatccaacaaacaatgattaaagggcaaatgaagtaggagaaaattatggttactttaaaaaatgatgtattagaagttgaattaaatgctaaaggggcagaaatcattaagattattggtcaacaagatcatttgaattatatgtggaaaagagatcctgagttatgggccaatagtgcaccgattttatttccaattgttggagctttacaaaataatgaatgtcgcatagatggaaaaacttatacaatgacacaacatggtttttctcgtcataatgaatatgcaactcatcaattatctgatacttgtgttgaatttgaattaacaccaaatgaagatattttaaaacaatatccttatttgtttgatttaaaagtgatttatacattaactgataatcaattacaatgtcattgtattgttaaaaatactgatacaaaaacaatttatttccaaattggtggacatcctgcttttgcttgtccatttatggaaaatgaatcaagtaatgattattatattgaatttgagcaaaacgaaactttaaatcaaaaaatcattgatgttgcacgtaaaggaatgtctcataaaacaacattattatttgataatgaaaaacgtttctttgttagacaagcattgtttaataatgatgcaattgttgtaaaagattttaaatctcactatgtgacattaaaatctttaaatcatcaaaaatcattacgtttctatatggataattttaaccatttaggaatttggacaagtaaacatgttggtggtttattagctattgaaccttgggttggacatagtgattatgttgattttaaaggagaatttaaaaataaagaaggcgttgtagaattacctgaaggtcaagaatttgaatgtcaatttacgattgaaattaatcaataaatgacaaaatatttataattgatgtgttatgattttttcatgaaagttaaaattattgaaaaaacacatgaattagatttagaagatgctttgaatgaatttttagaaaaagaaaatccgaatattcaagagttaaagtatcaagtcgcattgacttcacataatggcgagttagagtatagttttagttgcatgattgtatatttaccagaaatttcgccataataaatgatgtggaggtgaaaccatggctaaagatgtaaaatgtagcgtggatacttgtaagtattattgtgatggtcaatgtgaagcaagttgtattcatgtagataattgtcattgtaatgaagcaaaacatatttctgaaacagcgtgtgatacatttgaatgtaaaggtaaataaaaggctaatttagcctttttcttttgcttttgtacaatttagaaataattatatgaaaaataagaaaaatcaaggaatgtctaatcatggctttcatcattatgataaagatgttataatagaaaaggtgataatatgaaaaaaatcatatggctgatggtcaccttattgttttgtgtttcatgtacacaatcacaaattgaccctcgttttgaagaatatcaacaaattaaagatcatttaataacaaaaaagtcttttgatcaggattttgattttcaaatacgcgttatttttaatcagatggacaaaggttatcgttatgatgttcttattgatcatgctcaagttgatatgtatgatatacaggctatggcgtatgctggtgagtctgataaaaaaatgtgcccagtgattggtttatttgatgatgaaccttatcacttgaaagtcggtttggttgataaagaaaatcatttttataaaggtattcaattatctggagaatgttcttcaaaaaaatcaattaaagtttatatttcttattatcaagatgaacaaaaatctaaaaaagtcatcaagtatattgaggtgaaggaatgagattagataaattattagcccatagtggttttggaacacgtaaagaagtaaaggaattaataaaaaagggatttgttagtgtcaatgatgaaacgataaagactgataaaatgcatgttgatccacaaaaagacgtggtgaaagtggatgatgaagtcattacatatgaagaaaaagtttattatatgttaaataaaccaagtggttatgtgagtgcaactgaagatcaattacatcctacagttgtagatttaatcgatgattattatcgtaatgatttatttcctgtaggaagattagatattgatacagttgggttgctgttgttgacaaatgatggtgttttagctcatcaattactgtctcctaaaaaacattgtccaaaagtttattatgcaaaaataaatggtgttgtgacaaatgatgatgttcaaaagtttttggatggtataacgattgatgattatcaatgtcaaccagcccatttaacaattttatcacatgatgagacaacaagtgaaattgaagttgaaatttatgagggaaaatttcatcaagtgaaaaaaatgtttttggcagtagggaaagaagttgtttttttaaagagaattcgtatgaaaaatttagaattagatgaatctttagcactaggagagtatcgtcgattaacgaatgaagaattagatagattaaaagatgaatctatgctacaataataaaaaatattggagggacatatgcgtttaagaaataatcctaaagcaaatgaaattttagaaaatcacaaagatattgttgtttttaatccaaatgaaaatagaggaaagtggcatgatgtttttggtaatgatcatcctatttatattgagataggtatgggtaaaggtgattttattattgaaaatgctaagacatatccagatattaattttattggtattgagaagtttcctagtgtcatggtaggagctttaaaaaagattgatgaggaagaacctttagctaatttaagattaatgaaagtcgatgcgattgaattaaatgatatttttttagaaaatgaagttagtcgaatttatcttaattttagtgatccttggcctaagaaaaaacatgccaaacgtcgcttgacttctgaaacgtttttaccgatttatcaaaatatcttaaagcatgatggtgaattgattttaaaaactgataatcgaactttatttgaatattctttaatatcatttcaacagtttggtttacagtttgaagatgtgtgcttagatttacatcatagtgatggttatgaagataacattcaaactgaatatgagcgtaaattttcaccatttggaccgatatatcgtattgtaacaaaatttaaaggagatgagtcataatggatagtttaacaaagattagtactctagaagcttatgaagaagcaaagaaaggacatgcaatgatggtgttttcaacaacttggtgtccagattgtcattttttaaaaacatttattgatgatcttgtcaaagataatgctgaatggactttttattacattgatcgtgatgagatgattgatttatgtattgatttagaaattatgggcattccttcttttattgcctataaagatggtaaagaagttgctcgtttagttaataaattaagaaaaacgcaagctgatgtacaagcttttattgattctatagaataggggagaaaaaatgaacttacatgctttttataatcaagaacatattggtgatgtgttattaattcgtttaacacatattagaaaagttacacattttcttcgagaagatgatttatgtattttatatcatcaagataaagttattggatataatttatttcatgcatcttcttatatttctcatttatcagaaggtaaagtaaagataacacctacttttgttgatgagttaaatgcagttttaacaaaatatcaacaagatatagttacaagtgattatgatgatcattttagagttggaaaagttatcgagatgaaagaacatcctgattctgatcatatgcatatttgccaagttgatacaggagatgaaattttacaaattgtttgtggagcacctaacgttgcattaaatcaattagttgttgttgctaaaaatgatgcagttatgccttcaggtcttgtgattcgtccatcaaagttaagaggaattgaatcaaatggaatgttatgctcagcacgtgaacttgcattaccaaatgcaccacaagtacgtggaattttaatcttagatgaagctgattatcaagtcggtgattcgttttttaaataaggaggggaagaaatatgtttaaaaagttttttggacacgatgatgaagaagatgaagtttttgaatctgttgatcctgtcttagaacaaagaagaaaagaaaaatttagcactcctttgatttataatgacgaagaagaaacagaagaagtagaaaaaaaggaagaaaagaaaccagagcctaaaaaaacagtgactttagatacaacttatcatatgagtgaaatcatttcaccaatgacaggtttaaaagaaacaaaaaaaccagaggttaaagtcaataaaccaaaagttaaaaaaataaaaaaagaaactgatgaactgattccaattattagtccattttatgggcctgctacaaatttagaagaagaaaaagttgaaaagaagccagaagtaaaaaaagaaaaggctgttcatgaagatgaaccaagtgtagaaaacaatttgagaaatattgctcatattgttgaagaagaacaagatcaattgaaaattattgaagaacgtacaggtgaatttaaattagattttaaaaataaagatgaagattcatttattgatgaaattgatgattcaatgagtttagatgaattaatgagtctttatgaaaagaaatttaaagattaatgaagggaataggtgttgatatcattgatcttgaacgattggatattgagaacgttcattttgttaaaagagtattaagtgataaagaatatcaactctttttgcaaatgaattcttctaaacgtcgtttagaatttttaggtggtcgttttgctggaaaagaagcatatttaaaagcaaatcataaaggattaggtggaattgattttcatgatattgagattttaaatcatgatgatgggagcccttatcttaatgatgaaaatgcatgtatatctatttcacatgagaataaatatgcgattgcctttgttatgattgaaaagtaataggaaactattgctttttttaatataaatgaaatttttttatctttttctgattattattaaatcgaaattttaaaatttgtcgttaaaattatagttttttataaaataaaaatgtaaaaaatatagaaatgttttacaaaattaatgaaaaaatgctgtttgttataaaatatgagaaaattgggtttttgtcgctttttgtttatactattaacaaggaggaaatataaaaatgtttaatgagattattttaataggaaaattagcagggagaccggtagtaaaagaaacccaaaacggtgttaagttatcaacgattgttgttgatgtagaaagaccatatcgtaataatttaggtattaaagaccatgattatattcgatgtgttttatggaaagggattgctcaagaggtagcagattgttgtgatattggaagttttattggtttaaaaggacgcttacaatctagaacatatgaaacttctgatcaacaaacatcaactgttatggaagtaaagatcgaacatgttgaatttttggataaatatttgataaaaagtagtagttaatactacttttttgtttctttttggttaagaattgtgtaaaatagatgggtatagagaaaggagttcgattatgaaaatagatcaatcacatataagaaatttttctatcattgcacatatcgatcatggaaaatcaacgcttgctgatagaattttacaattaacaggtgctgttgcagagcgtgaaatgaaagaacaactccttgatagtatggatttagaaagagaacgtggtattaccatcaaattaaatgcagtacaattaacatataccgctaaaaatggtgaaacatatttattacatttaattgacacaccaggtcacgtcgattttacttatgaagtttctcgttcattggctgcatgcgaaggtgcagttttggtagtcgatgccgcacaaggtgttgaagcccagactttagcaaatgtttttttagccttggataatgatttagaaattttaccagtcattaataaaattgatttgccaagtgctgatcctcaacgcgtgatacatgaagttgaggaaattattggcttgccagcagatgatgctccacttatttcagcaaaaacaggattaaatgttatagatgttttagaggacattgttcataatgttcctgctcctaaaggtgatattaatcatccaactcaagctttaatctttgattccttctatgatagctatcgcggtgttattgtctttgtctgtgttaaagaaggaaaaattaaagttggtgatcaaatcaagtttatggcgactgatgccatttatgaagttgttgaagttggagttcgtacacctaaagaagtgaagaaagatgaacttgtaactggtgaagttggttggattgcagcatcaattaaatctattcaggatgttcatgttggggatacaattacaactttagacaacgaatcttctcatcaattaccaggatatcgtaaattaaatccaatggtttattgtggactttatcctgtagataatgctaaatataaggatttaagagaagcattagaaaaaatgaaacttagtgattcttctttaatctttgaaccagaaacttcacaagcattaggctttggttttagatgtggattcttaggattgttacatatggatgttattgaggaaagattggaacgtgaatttgatttagaattaattgcaactgctccatctgttgtttatcattgttacttaacagatggaacaatggaagaaattgataaccctgctgcattaccgggaccacaaaaaatagatcatatcgaagaaccatatgtgaaagcttcaattatgacacctaatgaatttgtaggtccaattatggagttatgtcaatcaaaacgtggtgaatatcaggatattgaatatattgatgatttacgtcgtaatgttatttatttgataccattaagtgagattgtttatgatttctttgataaacttaaatcatgtacaaaagggtatgcatcttttgattatgaattaagtggttataaagaaagtaaattaacaagaatggatattttgttaaatggtgatattgtggatgctttatcaacaattgttcataaagattttgcttataatcgtggtcgtattatttgtgaaaagctaaaagaaattattcctaaacaaatgtttgaagttcctattcaggctgcaattcagggaaaagttattgcgagaacaaatattaaggctatgcgtaaaaacgttttagcaaaatgctatggtggagatatttcacgtaaaaagaaattgttagaaaaacaaaaagaaggtaaaaagcgtatgaaagcagtaggtagtgttgaaataccacaggaagcttttatggctattctatcagttgatgatgattaattttgaggtaggtaatcctaccttttttactttattgacattttgtgaaattcagtttttcttttgagttgatttactttcaaaattgtttataatataataagttgtggaggtgcatggaatgagtttttttagaaaaagcccaatcagatttgatgggacaaaagaaattgaaacaaaagtaaaaaatcaaactgataatgttatctctagaagatttaaaatattaatggttggtgttggagcaattggagtcttgttgttagtgagattatttatgactcaaattagtgaaaaagattattatgatactaaattaattcaatacaatacaagtatttttactgctgatacttttagaggaaatatctatgatcgtaattataaccgtttggtttataataaaaatattaattgtgcaacatattatgctgttaaaaatattaaagaagaagaaattaatgttattgttaattttttaataaaaaatgttcgtgttgatattgaagatgtcactgaacgtgataaaaaagattttttaattttaaaagattctgattttgtaaaaggattattaagcaaagaagaattaaagcaagatgacagtacagtatataaattacaattaagtcgtattactgaagatatgttaaaacaaaaattaacagatcatgatatccagtattatatgttattctcaaagattcgaaattgtacgagtggatcggttgttttactagaaggtctttcaatcaaggaagcaagtttgataggagaaaattctaacttgttaagaggaattaaagtgacaaatgattggtcaagagagtatacatatgatgagacattccgttcagttttaggacgtgtcacaactaaaaagcaagggttacctgctaatatgaaggatttgttattggctaaagactataataatgattcgcgtgttggagttagtgggttagaagctcaatatgaaagtattttagcgggaacatcagcgaaatactcaatgtcttatgataatgaaggcaatcctattattaaatcggtatcaagtggttctaaaggcgataacattcgtttatctattgactgggagttacaagaaatgttaagtaaggacgttgaggactttttaaagagtcgaacaggcggaccttataataaccatttattcttaacccttattaatcctaataatggtgaaattattgcaatggtaggaaaacaacgtgatccaaaaacaggtaaaatcacagattttgcttctggaaactatttatctgcatatgctgttggatcaacttttaaaggggctacaatttacactggatttaaagaaggtgttttaacaaagggacaaacttttgctgatacttctgatggtattcaaatcaaaggaacaccagccaaaaagtcatgggataagagaggtttaggtgttttaaatgaagttcaagctttggctaaatcctcaaacgtttatatgttttatgtggcaattcgtttaggaaaaggacattatgtaccaaatcaacctttggatattgatgaaaaagcttttgatgttttgcgtaaagatgctggtgaacttggacttggtgtaaaaacagggttggatgttccaactgaagcattgggatatcgtggaccggtgacaagtcgtatggctggtaatttgcttgactttgctattggtcaatatgatacttatacacctattcaaatggcccaatatgtttcaacaattgcaaatggagggaaacgtattcaaccacatttctttgttgaatcatttgaagaaaatgatgaaggtcaaaaaatatctttattacaacatcaaattcaaattttggatgatgtttcaagttattctttaggtcttgaacgtgtgcaaactggatttagagaaggttgtgtgactggtttagctaaaagtatggatggctattataaggccgcaggaaagactgggacagcccaggtaccaattaagggagtggagtatcaaaaccgtgcattcgttggttatgcgccttatgatgacccacaaattgctgttgcttgtatgtctgaaacacaaactcagaaatctacaagtggatgtagcgctatcccaaagaaggctttaacaaaatactttgataaatatggaataaaaaataaataaaactgtagcaatttggttgactttatgctattatagtatggcgaagtcataatggaggtgtaaaaatgagagaaaacatcattttgaagtgtacagaatgtggtgaagaaaactacattaatactaaaaataaaagaaatcatccagaaagaatggaagttaaaaaatactgtccaagatgtaacaaaaaaactactcataaagaaaagaaataagcctaagggctttttttctttagaaaggaattttaattatgataaagaaattaatattaggttctatgcaaacaaactgttatgttgtttataatgaacaaaaagaatgtctggttattgatccaggagcaaatggacaaaaggttttgaaatatcttcgtgataatgaattaaatcttcaagctattttattgacacatggacattttgatcatataggtgcagtcgattatttgtatgaaagattacagtgtccaatatatactcatcaagaaacgtttcctttgttaaaagatcaacgtttgaatttatcaatctatgaagaaccctttattgtaaaagctcctatattagcagctatggatgaaatgaaaattgctgattttgatatagaatggcttttattggaaggacattgtcaaggaagtagtatgatttatataaaaaatgagaatgcactatttagtggtgatgtgttgtttgctggatcagttggaagatttgattttccaacatcatctcatcttcaaacaaaagaatctatggaaaaaatcaaagcattagcatttgatgcgaggctgctacctggacatggggaagaaagtacattaagctttgaacaacaaaataacccttacttaagatcgtattaaaaaaatatgatctttttttcatgaaaaaaaagaaaaatgagaattttttgcgtatatatatagtaggagggtaattatggatgaactatttgataagatgttatatcgggcattaaaggccaaagcaacagatattcaccttgtattaaaagaaagattgaaaatacgatttcgagtttttggtagtttaaagaagtacgatgaactagatgaggagattggaggaaaactaatgaattatattaaatatcgtgctttaatcaatacaaattatcgattacttcctcaaacaggtgatttttcaatcacaatacaagaaaaagaatattacttaagagtttcgtatttaccatcattggaatttgaaagtattgtcataagaattttaaacaatcacgaaattcaatccattgatgaattaacatatcaagaagatattaaagcttatttacattggcttacacatcaacaaagtggcttgtttttgataagtggagcaactggttcaggaaaatcaacaacactctatacagtcttaaaagaaattcttttacatgaaaataagaatgtgattagtattgaagatcctattgaaattcatttagatgaatgtttacagattgagttaaatgaaaaactcggaattacatatcatgatacgttaaaacaaattttacgacacgatcctgatgtcattatgattggagaagttagagatgagttaactgctaaaattgctattacttgtgctttaactggacatttagtcttaacgacaattcatgccagcagtgctttgttgtcattaaaaagacttatgaatctaggtgttcatcaaattgatatctgtgatgttgtcattggtgcaatgtcacaaagaatgaagtatgattcacaaaaagaacaagtgattgttttatcagaattaatgaagaaaggggagattaaagactattttgaaaagcaaaagatttcatatttgacttttgataaggcagctaagcaattaataaaacaaggttttgatcaaaatttatttataggagacatggctaatgaataaagagtatctctttttaaaaaatctttatactttattaaatgctggttatacatttgaagaagcccttatgatttgtcaacgtattttttatttaccaataattgatgatatgttagaggaattgaaaaaaggtgaagcaattgataatgttttattgagtcattcactgccaactttatttaaagaatatttttatttctttaaaaacaagaattgtttatctgaagcgattgaaaaaacattacatatttgtatgatgcgccaagattatcagaatcaattaaagtctaaattgacatatccacttattttaatgacatttttatttctcttttctatttttgttgtggttatcctcctacctaatgtgaatcaactttttgactcttttcagattcaaaaaagttttatgattcaaataatgtttacattcttttatcttataccatttttgattatgatagctgtttttctgatatcctttttattaattcgtctttattatgcacttaaaaagaaatcatatttgattattgaatggtatttacatcttccggtctttaaagtttgtttacaaaagtatttttctttaaaatttgcgatttattatcatgaattattacaagaagaaattgattcagcaacaattattcaattgttaaatgatcagatgactgagagtgatttaaagattgttttatatgaaatgtataatcgattacatgaaggtgaagctttagaagatatactgaatgattttgaatattttgatcctttgtttttgagtttttttcaaatgtatattaaaaatccaattcaaaaacaatctatttcacattatattgagttaacttatcaacagatagatgtatggatatcgcaatttctaaagtacctggttccatctatatatggatttgttgcgatttttgttattacaatttatgtatctattattattccaatgatgaatgtcatttctgacatctagaaagaaggtaaaaaaatgaataaatctggttttactttaattgagatgatcttctgtatttcagttattttggtgattttgctattggttattccaaatgtgacatcgaagaacacggttgttaaaaataaaggatgtgaagcccaaatagaggttgtcaattcacagatattgctttatgaaatagagaatggtgaacttcctacgagtatttctgatttaacaagtgggtcacacccttacttaacagaaaaacaaggaatttgtcctaatggaaaaagtatttcaataagtgatggacaagcctatgctgactaataaaggattcacgctaatagaaacactttttgttttgatgattatttgtatactttcttctttatcgatgaatttacatatgccacgtaaaagtgaggaagtcagcttagcagaaattgaaagttttatacgtgaggctcaatttattgccatgaatcaaaaagtaaccattactttgcaattttcttcccatcagattacttatcatggatcagatcatgaaggatcttatcaattgcctgaaaactcatattttgaaacacatacattaactttcaatgaaatggggcatatcaaaggggcaaagacattgacatatcatgctccatcaaagaattatcattttgtttttcagattggaagcggggctttttatgttcaataaacgtggctcaacattaattgaaagtctttttgcttttgaaatttttataacagttctggttttatttgtttcattaatgacaagtgttttttctcaagaaaaacgcattttagaaaattatcaatatattttacaaaaggaaggtgagttaacatacgaacacgattttaccgaaatcatcaatcaggttttacattaattgaagttcttttatctttaagtatcactttaatcatcacaacgagtttatttggaatgtatcggcttatatcccatagttcaaagatatcaccatttcctgaagatatttatcgcgctgttaagcaagtgagtcaatacgtgataggaacaagttatatagaaattggtgatgactatcaatatgttaattatgctggtgaaacgatgatattacagcttgatcatcaccgtttagtaaaaacaccaggatttgaaattcttttaacggatatagatgatctacaatttgaaataattaatgatttggtttatgtaacaataacccgagatgaaaatgattatcgttttttattgacttatgctaaagaaaaagaagaaataaaggaggaaaatgaagaagttattgaataatcaaggttcagctttacaaatcgttctggttacgtttttaataatgattttttcccttacaacttgcttgtttttgatccatcagaaagtcactcattatcaacatattgatttaatgatgaaacagaaaaacctagagattttattagtgaaatactatgtggaagaaatgcaggaaggggtattgatgagtgatgattatgaggatgatgattatttgatagaaagttatgtagatgatatgggttctttttatgaaattaccacacatgttgaatctttaaaaatgaattatgaatttattgttgatattaatacaacaacctttgaagtttctcaatttgaatataagaaggagggatagaatgatttttttaattatgggaattgtctttgtatgttttttaatgagtttatatcgtcaacatggacaaattaatgaatctcagaaaaaaacaattaattgtatgattgcgattttattaacattagatattgtatttgttctattttgttgatttggttaggaatagacatatttttgttttacatatagaaaaaaatttgttataatgcaaaagaaactgacaaaggagagataagatttatggcaattaatattaaagaattaaaacctggtaatgcatatactgaaggaaatgatttattcttatgtatttctaatgaacaaaacaagcaaggaagattatctggaaaatatatggtaaaaagaaaaaacatgagaacaaattcaattactgaagtttcttataatccgactgctaaaattgatccagcaatgattgaaaaaagcaaaatgcaatatttatatgatgctggtggatctttagttttcatggataatgaaacttatgaacaaattgaaatcccaagtgatcgtttaaaatgggaaataaacttcttaaaaccttctgatgaagttgaaatcacaagtttctcaggtgaagttttaggtgttcaattagcaacaaatgttgcctttaaaatcattgaaactgaaccagctgtaaaaggtgatacagctactggagctacaaaaaatgcgattattgaaacaggattccaaattaaagttcctttgttcattaatgaaggtgaaattgtcatcgttaatacagaagatggtaagtatcaaggaagagcgtaagctctttttttcatattttaaataacttgggcatatagtgtacaaaaaggagaatgaatatgaataaacaagcttttacttttttgacactttttagtctcatcctcgttttatcgatttattatattatgttgccacccaatcaaaatgagaaaaccgtaacacaaacgcaaacaacaattgaacaattacaagaacagctgaatcaaaaaagagaagatattattgaaaaaaacaatgaaatcatcgccaaagagtcaagtacatctgattcgattaataaagctttagctactattagtgaaacaaagaatattggtgaaaaagaaaaaagtattgttgctaaggttaaagaattgggatatcaagatgcttatgtagaaatcgaaaatcaaacaatcaagataacagttttgaaaaaagatgcgaaagctagtgatgcatcaaaagtcattaaggaagttttaaaactcgttggtgatgattatcaagttgaagtaaaatttattaatgaataatcttgtaattttatgactttttatatacaatagaagtagggaaaagaggtaataatatggcacataatgaatattatacatttgatcaaggaactgtgaacggaaaaatattgatgaatgttcaagtctttgatgaaattacaaaaagaactgtaaatgaaatgaaaaacgtttctttagatacatcaaaaggaattcagattcctggaacaaaggcagttgtatcttgttcaattaaggaaaatgaagtttatatttgtattcatgtacgtattaaatatggtgtgaatgtatctcaaatgacaaaagaaattcaagaaaaaattgcaactgcaattaaacagatgacaggtgtatctgttaaacatattgatattgaagttgacgatattgattttgaataggctaagtaagaatctctattcttacttttcttttgtttattttttgtagtatttatggtaaaataggtttaatttaaagagtgtggaggcaaaataaggtttatggaaaaaacacgtagacaaatagcgagagaaactgcaacaattggtatttatcagaatttattggtggaatcttcgcttgaagatatttatcattttttaagtgaaaatgaaaccctagcaaagagtcaggaatcaatggaatttgcaaaatggttagttgagaaaactgttcaaaatagaaaatcttatcaagatttaattgaaaagcatttgaaaaaaggatggacttttacaagattaagtgtcatggaaagagctattcttttaattgcaacatgtgaattattagaatcagaattaccaaaaacaatcgttattaatgaagcagttattaatgcgaaaaaattctgtgatgatgattcttataagtttattaatggtgttttaagtcaagttatctaatggaaagacaatatattagtgtacttgctttaaataagtatattaaagcaaagatgggacaagatgctgctttagcaaacgtctatatcaaaggtgaaatttctaattatagaccacatcccagtggtcatctttatttcacactgaaagatgaacattcacgtataagtgcaattatgtttgcttctcaagcaaaaaaattaaaatttaacattgaaaatggacaacaggttttgattcgtgcaagtgtttcagtttatgaagcatcaggtcaatatcagctatatgtacaatcgattgaacctgatggaattggacaattatatattcaatttgttgcattaaaggataaattagcaaaagaaggattatttgatgaatgtcataaaaaagatattccatcttttcctagaagcattgctgtcttatcagccaaacaaggggcagcagttcaagatgttgtcagaacaattcatttgagatttccttttacaaaagtaattgtttttccaattcctgttcaaggaaaagaagcttatataaagattatagaaaccttgaaaaaagtagatacccttcattttgataccattattttagctcgaggtggtggttcaattgaagatttatggaattttaatgaggaagcattggttcgctgtgtgtttgaatgcacaaccccaattattactggcattggacatgaaacagattttacaatctgtgactttgtaagtgattatcgtggcgctacaccaacagcagcagcggttaaagcaactccagatcaattagaaatgaaatctcactgtacagctttacaacaacagttaatttataaaatgaaacattatttagcattacaagaacaaacacttcaacgacttaaaaaatcttattatttatctaatcctgaagtgttatattcacatgaaatattaagattaaccaatcttcaagatcaattatcttatcaatttaaaatgtttgatatgtctatgtatcaacagcttaaaagctatcaagatgaacttattcaaaaaatgaattttcatcttcaaaataaaaattatcatttaaaaaagataattgctcaactagatgctttaagccctttaaaagtgatgcatagaggctattcattagtcaaaaagaatgaccaagtcattcaatctattcatgatttgcatcagggtgaaattgttgatattcaaatggtcgatgggataaaaaaagcagaaataaagtaggtgacattatggaagatatgacatatgaaaaagcaataactcgtttagaggaaattgtagcaaaattagaaagtaatgaaattcctttagaagatagtttagctcttttccaggaaggaattgaattgtctcaatattgtgataacaaattaaaaaacattcaagaaaaagttgcacaaatttatgaaaatggtcaacttaaagattttcaaagtgaggaataactatggatcaattaaaagaggaaatcaatcaacaactattaaaattactttcttcagttaaagaaggaaaagtcaaagaagcgatgacctattcattgttagcaccaggaaaaagactgcgaccacttttgtttatttatgtgcttaaggcttatcaaatggattatcatgcatatttagatattgcatgtgcaattgaaatgattcatacatattcattgattcatgatgatttacctggtatggataatgatgatttaagacgtgggagaccaacttgtcataaacaatttgatgaagccactgctattttggcaggagatgctttattgaatttaagtgttaatacaattttaaatatgtcaatagataatgatttaaaagtagctattatgacacgtttatatgaggcgagtggtgttaatggcatgatttatggtcaacaacaagatttagcttttgaaaatcaaaatgcttctttacaacaattacaagatatccatcatcataaaactggtgaattgattgctgttagtatgcaacttgctgctttgattgcgaaaaaagacgattatcagtattggacacaaattggatttgatttaggtttagcatttcaaattcaggatgatattttagatgttgttggtgaggaagaaaaactagggaaaaaagtaggaagtgatctagataatcataaatcgacttatgtgacacttcttggaattgaggaatcgcaaaaaaaagttgaagaactatttcaaaactgttatgaaaatgtttattcaatgcgaattaaccatggtttaattttacaaatattaactgttattttgaaaagggtgaattaaatgaatcttgaaaagattaaaaatcctgattttttaaaacaattaaatgttgatgaaatggaagcattggcagcggatataagggaatttattattcaaaacgtatcacatacaggtggccatttttcaagtaatttaggggttgtggagttgactattgctttgcattatgtctttaattcaccaattgataagattatttttgatgttggtcatcaatcttatgttcataaaattttaaccggcagagtaaatgattttgcaacgttgcgtcaatttaatggtttaagtggttttcaaaaacgtaatgaaagtgaacatgatgcctgggaagccggacattcttctaccgctttatctggtggaattggtatggctgttgctcgtgatttgaatcatgaaacaaatgaaatcatttgtgtagttggtgatgccgcaattatgagtggggaatcatttgaagctttaaattatctaggttctattgattctaaagttattgttattttaaatgataatgacatgtcaatttctaaaaatgtcggtggattgagtaatttcttttcagaaatacgtatatctactcagtataaaaatgctaagaataactatattagttttttaaataagtcaaagactggtcgaaaaatttatcatatgacaaaaaagattaaagatcatattaaagaaaatgtgattgatgataatatttttggtgaatttggtttagattacataggacctgtcaatggccatgattttcatgatttaatcaatgcattgattcttgctagagaaatggatcatagtgtggttgttcatgttcatacaaaaaaaggaaaagggtatgttttagcagaaaatgatcgttatggagtatatcatggtgttccaccatttgattataaagaaggtattttaaagtctaaaggaaacataaaaagctggagtgctattatatcatcacaagttgaaaagttgatggatgaagatgaagatattgttgtgattacaccagcaatgatttcgggaagttgtttaggagatatttttaaaaaatatccaaatcgtagttttgatgttgggatagcagaagaacacgctatgacttttgctgctggtttatctaatggtggaaaaaaaccatatattacagtttattcatcatttttacaacgtgcttatgatcaaattaatcatgatattgcacgtatggatttaccttgtttaattggagttgatcgtagcggacttgtaggatctgatggggaaacacatcatggtgtatttgatatcagtttcttgtcatctatcccacatcttactatcatgacgccaaaggatgcttatgaagcaaaaacaatggttaatactgccatgaaacaatttgatcatccatacattctaagatttcctaaaggaagtgttgaagattgtcaagttgatacgtcagaaacattacaaatcggaacttgggagaaaattattgataatccagattatcatttaacaattgtcacatatgatgcaaaagtctataaagttaaagcaatgattgaaaacaaccagttacctgttaacttaattaatgcacgatttataaaaccacttgattttgcaatgttagatgaattgtatgaaaatcatcaatctttaattatttatgaaactgatttaatgactggttcattaggatcacttatttgtcaatattatgctttaaaacatcattatatgtcaattgattgcatgggtattgatgatcattatacacctcaaggtgatattgaaactctgttaaaacatgaacatatagcaatagatgatttattaacattaacaaaggagaaatgccgtgaagaaagaaagagttgatgttttgtgtgttgaacaaggcttgtttgattctcgtgaaaaagcaaaacgagcaattatggcaggaattgttcgtgatgattatgattatattgataagcctgggacaaaaatacctgttgattcacatttgtatattaaaggtgaaaaattagcttatgtttctcgtggtggattaaaattagaaaaagcgattaaagtgtttcatttagatttacataatcttttcatgttagatataggatcatcaacaggtgggtttaccgattgtggtctccaaaatggagtgaaagaagtttatgctctagatgttggaacaaatcagttggtatggaaattgcgcaacgatgagcgcgttcacgtcatggaacaaacaaatttcagatatgcaactttagatatgtttactcatggacaacctgaatttgccagtattgatgtttcttttatttcattaaaacatatctttaaacctctcaaagatattttgaaaaaagatggttatgttgttgcacttatcaaacctcagtttgaagcaggaaaagatgatgttggaaaacatgggattgtgagtgatcctttgattcatcagagagttatcaaggaagttatcagttatgcacatgatgcaggattttctttacaaggtttagattattcaccaatcactggcggtgttgggaatattgaatttttaggatgttttaaaaatcaggttgattgtgatattgatgttgatattgtagatattgtcaatcaagctcatattcattttaaaggataggtgataaggatgcttaagagtctatatatttcttcatttgtgattatagataaaatgcgggttgatttcgatgatgggatgagtgttttaactggtgaaacaggagcaggaaaatcaataattattgatgctttaaatcaactttgtggaaatcgctctaaagctagcctcattaggaaaaatgcgcctaaagcggttattgaagggatttttgaagtgaatatgtcaccagctttggaagcattatgtgaagaattacatattgaagctgatgaacaattcgttattacaaaagaaatattacaatctggaaaaagtaatgttaaaattaattatcaaagctcatcaaataatgctttaaaacttttaacaccttattttcttgatattcattctcaatttgaaactcaaaaattatttgaagaaaaaaatcatattttgcttttagatgaatttgctaaaaaagatttagaaaatatattagtagattaccaaaatatttttttagaatatgttcatatgaatgaacaattagaaaacgcaatagaagaagatatgagtgatgaacaactagattttttaacagctcaattgaatgaaattgatgaattaacatatactgatgatgaagtagatgaaatggaagaagaattaaaaaagcttcaaaattttgaaaaaattaatgaaagtatacaaacattttcacagtatatgaatcattctcaaggtgtattaccacaattcaaagatgccttatctgcatttcaaacattaagttcatatgaagaatttcaagattcttatgatcagctttacaatcattattataacttaatggatgaatatgaaaatattatggaaatctatcatgattttcaatttgatgaatatagattcaatgaactacaagaaactttatataagattaatcgattaaaacgtaaatatggatttacgatggagcgtattcaagagtatcgtcaagaattaagtgaaaaaatagatacgattaatcatcgtgatgaatatatcgcttcattacaagaacaaatcagccacttaaaaaaagaggctactttaaaagcagaaacgatttctcagattcgctttcaatatgccaaacaatttgaaaaagatattcaaaaagaattaaaagaaatgtatttagataaagctgtttttaaagttcaatttgaaaaaacaaaattaacaaaattagggattgataaaattaaatttatggtttctataaatagtggtcaagatttaagtttattaaatgaaagtgctagtggtggagaaatttcacgaattatgttagcaattaaaattgttattttacaatatggattggttgaaactattgtttttgatgaagttgatacaggagtcagtggtaaagtagcaacaagtattggtgaaaaaatgcgccgtttagcacaaaatatacaagtcatttgtattacacacttaccacaagttgcatgtcttgctcatcatcaatatagtattgaaaagaatagtcaggatactcaaacaattgcttcaattcatcgtttagatcaagaagaacgtgttttagaaattgcgaaaatgctatcgggagaaagcattacacaagaagctattgaaaacgctaaaaaattattaaatgtataatcacaagcatatatgccaaactaaaatgtaatcaaaaatggttacaaggaggtgtatatgctttgctttataaaaagttaagtattacactcatggttgtcgtttgcttgctttttccaagtcaagtttttgcagctgaagttattttaggtggacaatcgattgggatagagcttgattatgatggtgtcatgattagcggaacatatgagatttctattgacaataaaaaatataatccggctaatgatggttacttatcaggtgatttaattgttgctgttaatggagaacatgttgattcgatatcacttttaatggattgcgttgaaaaagaaattgaagataaacagacgattacattgacaatcaaacgtcatcaaaaagaagtcaaaaaagaattgaaattccaagaaaataacggacagtttactaccgggctctatgtgcaagatggtttaacaggaattggaacaatgacttactataatcctcaaacacgccattttggagctttaggacatcttatgtgcgatgtttcactctcaagtgatgttattattaaagagggtagtatctataattcctatgtaaaaaaagttcacccttcacaaaatggaactcctggtgaaaaagttgcagatattggttcaattcaaattggaactatttttgataacaacaattatggtatctatggtgattatcaagacttaccaagtgataaaaaagttatttcaacagcttcaatagatgaagttgaaaaaggtgaagcttattttttaacggttcttgatggtcatactttaatgaaatgtccaataaaaattactaagctcaaaaaacaaaatgaaccgtctattaaaggaattactttcgaaattacagataagaaaattctttctttaacaaatggtattattcaaggaatgagtggttcacctattatacaaaatggaaaattagtaggttgtgttactcatgttgatgtcaacaatgttcatcaaggttatggtttatatattgattggatgctcgaaaacgacaaatagggaaggaatcatcactgattcctttttctaatttcaacataactagacatttcataagaaatattgtcgaaaaaggcagtgaaaaaaatgacgaatccttatatcttttcttttgagactattatttttcattttagactaggaatcttattttgacacatatataataaatttgctgatgagaataaatcgaaaggggaaattggaaaaatgaaaacttttattgctatagatcaacaagaattattggaaaatgtaaaaatgaatttagaaaaaacaaaccgttttgaaattattggaactgcaaataatggaacagattgtttgaatttcttaaatcaaagatcttgtgatttattagttattgatttaatgctttctgaaattgatggtttaggagttctcaatagattaaaagaaatgaataaaaaaagttatggtaaagtgatttgtataacacaatttactaatcaaatggtttgtgatatgttagaaaacttagctgttgattattgcttcaaatatccatttgatatgcaacattttgtacaatcggcactttacattacaacaagtgatcaacaaaaacatgatcaattgttaaataaagatgaatcagaaaaatacaaaaaagtaaaaatcgaaaatgaaattactgaaatattacatgaagttggaattccagctcatataaaaggatatatgtatttaagaactgccattttaacaacttattacaatattgaaatattaggacaagttacaaaagttctttatccagatattgcaagaatgtataatacgacttcttcacgtgtggaaagagcgattagacatgctattgaagttgcttggaatcgtggaaatactgatgcaattgatgatatttttggatatactgtttcagctgtcaaagctaaacctacaaactctgaattcattgcaatgattgctgataaattaagattagcacacaaaactgacaatgttaaaaaagaaagtctttataattataaaaattatatgttaaaatagtataaagacaaggtggtgatggttatgcagattatatttcatattgatttaaacgcgttctttgctagcgcagaaatatctgttaatccatcactgaaaggaaaaccagtagtgatatgccgtgagtcaagacgtagtataattacaacggcttcttatgaagcaagagcctatgggattcactctgcaatgcctttgtttaaggctaaagaactatgctcacatcttattgttgttcatccacattttgctttatataaaacactatctcaacaatttttcaatattgttgctacattttctaagaaattagaagttgctagtattgatgaatgttatgttgatatgaccgattatattaagcagcattctttctctcctatagaaatagcaacactcattcaaaagacagtaaacgaacaattacatcttcaatgttctatcggaatagcgcctaataaatttttagccaagatggctagtgatatgaaaaaaccaatgggaataacaatgataacaaataagaattataaagatatcatttggcctttaccaattgaaagcatgtttggaattggcaagaaaaccgctccaaaattacatcaattaggtatagaaacaataggcgacttagccaaaagagaaaactatgaaaaaacacgttctatttttggtaaaaatgcattacttttttaccaaaaagctaatggtaaggatttttcaaaaatcaattatacaaaaaatgaattgaaatcagtgggtaattcaacgacttttgaaagagacagtaatgatgaagaatttataaaatccatgtttcgtcaattatcaaatgaagtctcattacgtgctcaaaaaagacaacttgtctctaattccatctctattactcttaaatacactagagaaaaaagtcgaacaaaacaaatgattctcgatcattacacaaatgattttgaaacaatctatgcaagtgcattattactatttgaaaatatctaccaaggtgaaatgttgcgattagtaggtgtgagtttaaataacgttattcatcaaaatgaactcaatgaacagatttctttatttgatccaaagcaagaattaacaaaaaaacaagttaattcaactgatcaaattattcatcaactgaatgaaactttacctggtattaaggtgatgaaagcttcttctttaatcaaggaagaaactattcaaaagaaatatttgaaaaataatgaataaactcaaaaaacgctcatatgatttatcaaagaggtgatacaatcatgagtgtttttttacgtcgttttattaatcataagaaatatattcttattttgatgagtacggtttttgttggtggttttctttttggcttttttcaatattcattagtgaatcaagatataaaagatttttttcaaaatttattttatctcaattgtgaaggatatcaaaatcagtatcagcaatatgtgattcaaagtggtgtttatatattgatatgtacatatctgagttcgagctattttggacatgtcggtttattgtttttattatttttaaaagggctacaattatcattttcatttgtctatgttttttctcatattcctgtttcttttgtactaattgttttattgtgtgtagaaatgattttagaaatagctatatgttttatcttaaatattgtttgtatccatatttcaatttatgttaccttgattactttttatattgaacaaaattttaatataaaaagcatgatgaattatcgtttaaacaatattattataacgcttattcttttttctttgtcactcgcttttcgaatttatgtgattccaatgttttaaaaaatccttgaaatgaaaacaaggattttttaaggttaattcatatctatatattctgcattacagctagggactgtaatatgtgctcccatagttgatgtataagtatataagccattgcattcaccatagacagtgaccttatctttttctaagaatcggctttgattatctttataaatatatccaactaaaataacattttcataatttcctttggttgctattctcatctgagcacccttaccaccagaaatatcattaatttgaataatacgaccagtaaatttcataagttctcctttatgcttatttccatttctagccaattcattatacccgatagagtgacattgggatttatattttttctttgataaagttgtgcatttaatctttaagtcacatgataattcattatatttaattttaaatgttgatgtttgatctgttttcaaagcccctggattttcaactttccatccctttaaatcaactttagttccattttcagacacaccaacaactgatattaatgaagtattatcaataaatgttccatcatcagttttccctttataagtagcacttatggaagtgattttatctttaattgtaatattgactttattactatagaatttttcatttgactttttattaactgcataaaattgaatatctgtttcaccagcttttaaagcttttaaagtattatcatcaggattaaattctaataattcatcattatattcaagtccaaactgataattatcaatcttatcttttggttcaaaatcaatattaccaccaaaaacatcaccgacattaacaacatctttttcaacagatacatttaatttgacatcatcctttttttgacagccaacaatcaccagacaaaccatgatagataccaaaatcttcaatagctttttcatttttttattcctccttgttctagtttatgacaaatatttttattgtttccaaaaacttaagctattcttttttatatattatcatatagagtctttagattctattgataagcactataggagacataaatctcatatgaatgcaaaaaatcatttctattaatgtgaatccttttataaaaacgatgttatttaaagagagtttttgatataataaaaaaggtgatatattttgaaatggaaagatgctttaagagaatataaacaatatatgattgttgaaaagggatatagccaaaatacaatcgatagttatatgcgtgatttattagatttctttaatgttattaatgaacaatatcacattgacaatattgaagatatttcaaaagaccatgtgtatctttatcttaaagaaatgaaaaaacacttatcgacatcatctagcaatcgacatatggtttccttacgacaattctatgttttcttagtcaaggaaaatattgtaaaacaaaatgtaatgagtgcctttgaaatggcgaaaaaggaacaatatcttccagaagtcttaagcaaagaagaaattaaccaacttcttgattctgtagaaatcagtgatccgatttcagctcgaaataggtgtatgatggaagttctctatgcttcaggattaagagtaagtgagatgtgttctttaacgttatcagcagttaatcttaataaagggtttattaaatgtataggaaaagggaataaagaaagaattgtaccgatgaatcatcattgttgtcaattactaaaagaatatattgaagaatatcggccacaattatgtgagaagaatacaagttcataccttttcatcaataataaaggtatacctattaaacgtgatgatttttatcatattcttcaaaaacttgtgcaaaaaagtggtatcaaaaaacatgtgactccgcatactttacgtcatacatttgcaacccacttactagaaaatgatgctgatttaagatctattcaagaaatgcttggacacagtgatatttctacaacaacaatctatacacatgtttctcaaagtaaaaccatcgataaatataaaaagttccatccaagaaatcagaaaggaagaaaataacatgaaaaagtataaaagagtatttttaattgtattagattcattaggagtaggggatgcatgtgatgccgctgcatttggtgatgaaggtgcaaatacccttggacatatttgtgaaagtgtaaatggtttagatctcccacatttagaaggcatgggtcttgggagtattggaaattttaaaggaattcattctttaaaaaatcaattggcatatactgcacgtttagaagaagtttctaatggtaaggataccatgacaggacattgggaaatgatgggattacatattacgaaacctttccaaacatttacagaaacaggatttccaaaagaatttattgaattatttgaagaaaaaactggtcgtaaatgtgttggaaattatgctgagagtggaacaaaaattttagatgattggggagaacatcagataaagacaggggattggattgtttatacatcagctgattcagtttttcaaattgcagccaatgaagaagtcattccgttagaagaactttataaagcttgtgaaatagcaagagaaattgctatggatgataaatggaaagttggacgtattatagcaagaccatatatcggaaaaaagaaaggtgaatttgttagaactgcaaatcgtcatgatttagctttaaaaccatttggtaagactgttttagatagtttgaaggaaaatcatatagatgttattggaattggaaaaattccagatatatttgtagatcaaggcattactaaaaaagtaaaaactgtttcaaatgctgatggaatgcaaaaaacaacagatattgcaaaagaagatttcacaggacttgcttttttgaatttagttgatttcgatgcggtttttggacatagaagaaatccagaaggttatggacaagctattgtagaatttgaccaacaactagatgaattattatattatttaaatgatgatgatttattgatgattactgcagaccacggaaacgatccaacttataaaggaacagaccatacgcgtgaaaatgtgccattaattatctatagcaaatcacttcaaagcccaagacatttagggttgttaaaaagctatgcagttattggtgcaacaattgctgataattttgatgttgaaaatccaggcattggtgattcattgcttgaacagatcatttaaggagttattatggataatcagaaaacgagaaaagttataatcatgtcattagcaggattattaataggcagtttgttatttatttttgggatttctttacaaggtaatttatggccattaataaccaattatttgattgcaatggcaatgtatgtatgttcatttttagctgtatataataacaatcgtcaagatccacaaccaatatataaatatataatggttttaagcgtatttattggtttgattgtgacaataacagcagtatcaaatattctataattcacataagatacattatgcgaagttaagtgtatataaaaatatctataaagaaaaggagcctttattgaaacaagactcctttttattgctatttttgatatctaagccataaagtataacaaataatcgataaaaaactaaagattacccctaacatcattgcatatgacaaatgaaaatcggctaatctcccaaaaattaaatttgtaataatagcaacactgtccatcatgacagcatttaaacttaaaagtgtagcacgatttgttgtttcgatttgttgattttgaattttcatttgtagtggctgtaataaactaaatgaaatacgcattcctacaattgcaataattgaaataatcggaatataagttattgtgagtgcgctacaagctatgaacatggatattaacaaaataacaatcaaccgtctctcccctagtttatttgtcaaatacgttgagaaaagacctaacaagccacaaagcgttgtaacaatataaatatatcctatttgttgattgtttaaccctccagcaataaactgtaattgatttaagaaagttgttattgtttgatgagtttcattaaataacgcaattgcaattaaaaacaaaagaaatgccttatgcttcaaaaactcttgaaagcaatcacgaaaatcatttaataaaaaagaggaatttgacttatcttgatctttcacttcatttaaacctaaagataagaaaaaagcaatagcataactcatcattgttaaaaaagctgcttcacgataatgatcacgaataaagattgaataaactcctgcagcaaaaatcaatcctgtagttcctaaattattatagatagaaaatactttttgtgattgctgtggtggagctgataaatataaaatacttgaatccaaaccagataatcccgcaataacaacacttaatataatcctttcaattaaaaaagctgtaaaaccatttgctccataaaaaacaattttactaataaaataaagtaaagaacaaataatcattgatttcttataccctattttatctgcaacaacaccccaagggatttccaataaaatagctaatgctaaagaaacactttcaataaatgtaatttgaaaaactgttacacccacactttgacgatacaaagttgctataggtccataaaataccatgccttgtaaaagagacattgcatacattatcctaatattcttttttgagtacataaaaacctccctatttatacacataaaaaatagaacttatatctttatttattttttagtgggtatcaaacaggtaggttcatcctttacacatcctttaactttttttatcatatcaaattttatttaataagtaaataaaaaatcagaattattctgatttttagtaaatttcattaatatatttatgattatccacaatatcttcatgaacttgatttgacatcatggttataattctttctttatctccgtctatagctatattcatatccccttctaccttcaatacttttgatgaatttttaaagtaagataacatttttaaaatggcgtcattatttaaataaacacattcacttacatagatttcattttcatcttcatgataaataagataaccatgattttcaaaaataagaatttgatcatcaaaaatatgacatcgataaatcaattgtttccaatattgttcatctcttatacaatactcatctaaagagcttgtataagcttcataataagcttttaaaaggttttcatcatcagtgggcatcaatggttcaaaaccaagttttgatttatctacagtaataatttgatgaaaatgagatgcattgaatccaaaaggacgataaatatcaggtacatatgcttgtaaatagatttttttatcttcatatcgttttaaaacatcatttaaaagatatttcatacacccttgtccttgatactccgcttttgtacaaacacctaatataaaataacattcttcctcgatttgatgatttttaatcatcattggatgaatctgtaaaactgaaataatctcctgataattctttaaaacaaaagtattttctttttgataaagattatcaaaataataatgtgttgtttctaaagtttcatcaacaaaagattttttccataaatcaataatttcattaaaatcatcatcacttgcttgactcacacataactttttttcataaatacaatacttatgaatcatttttaacggatgtaaagattgcttagatttacgcaagttttctaagcccatatcttcttctctattgacatatttttcaccaggaaaatgatgttctaataactcttttaaaattgcaggataaagtcctcgaatttctttatttgctttttctacatgaatttgaattgtcgaatgctttaagcgtgaagcaattataaaagcctccatttgttcatcaataaagatacctcctacttcaaaatccaaaagatgttttgaagataataatgacataataccacgaacttcacttgtcatcgattcactcaaatcatctttttcagcttcccacttattcaaacattgtaaaatagtttcaaaatcttcagttaaatctaaatcacgataaacataatgcggatgttcttttaaaaaggcattatagtgatttcttcttttttgcattttctttcctgataaagtttgaagcatttgacgatcataaatgtaatcatcgttataaggggttctttcaaataataattgttcatgataatctttttgaattatttcaacaaatgattcaatcgcacaatctatcataaatagaaattgattttgatgactgtaatcaatcatataatcaatcgcttctttataatatttgggtgctgtaaaaggcatagcccaaaatctcattcctttataattatgtaacatcactaagaaatgctcatgaatttcatattgaatatgatactcatgattccacatcatcattgttacaaaattggaattataaccttcataatttgctaaatctaaatacggtttaataattggataatcttctaattttaattctttcattatttctttccaagcaacatatgaataaactgttttgcagttcgcccagaaaaacctccatttctgatttcccattgtaatgctttgtcatgtaattcatcttcatccatatccaaatgataagcactagctaaaccatcgataatatccaaataatgttgtttatcaggatgaatatacataatctgtacaccaaaacgtgaaacaagtgataatttttcttgtttagcatcattgttattaatttcttgatcatgatttctatcattccaagtttctttaataagatgtctacgattacttgttgcataaatcaaaatattttctggtttcttttctaagccaccttcaataacagcttttagatatttatattcaacctcaaattcttcaaatgataaatcatccataaaaataataaaacgatattgacgattttgtaattcattgataatttgtggcaaagcaataaattgatgcttataaacttctaccatacgtaaaccatctttataatattcatttaacaatgccttaatactactagattttcctgttccactatcaccatagagtaaaacattattggcttttctaccatttaaaaaagcttctgtattggcttttaaacgttctttttgactttcataaccaattaactgttctaatgtattattcccaatatgttcaattggtataatctcattatctaaataacgaaaagctttatttaaaccatattttcctactccatattgacgataatgattatataatatttcataaaattctgctactgatgtgctctttgaaagcataatttgtagctttgttaataaatcataaatttcttgattaataattggcttactatgaggaaaatcaataaataaatctttatatagtggattaagcttagaaaaatcaaaatgatacatttgatatagcatctgcaaatcattcataatcacttcttttaaagcttcagaaataggttgttttctttctaaagataaagtaaatgaattttcatgatgagctaataaatacgtcagtaagctttgaaatagatgtccatgtaaatcataacgttcagcaagtgtaagcattgtagcaataaaatcttcttcatttaaaagtgattcatcttcaataaatgataaacacttttcaacatctgcatcttttgttaaatgacgataaataattaaatgatctaataacattttttataccttcttccttatagttaaaaaagacgacaaacatcgcctttttaatttttaaaactatggattggagccggaattcttccaccacgatcaatgaattcatcacatgaaaattcattcactggcataattggtgcataacctaataaaccaccaaattcaacagtttctccaacatctttaccaacaactggtataattctaacagctgttgttttttgattaatcataccaatagccatttcatctgcaataatcccagcaattgtctttgctgatgtttttccaggaatagcaatcatgtccaaaccaacagaacatacacaagtcatcgcttctaatttttccaaagtcaaagcacccgcttcaacagcatcaatcatactttgatcttcactaacaggaataaatgcacctgaaagtccacctacatatgaagaagccataactccaccttttttcacttggtcatttaaaattgcaagcgcagctgttgttccaggtgcccctactctttcaagacccatttcttgcaaacaatctgcaatactatctccaacagctggtgttggtgctaatgataagtcaataattccaaaaggaatattcaatgctgctgaagcttctctagcaaccaattgtccaacacgagtgattttaaatgcagttttctttacagtttcacataactcaccaaaatcttttcctttagcagttttaatcgcatttctcacaacgccaggaccactgactccaacattgataattgaatcagcttcactcacaccatggaatgctccagccataaatggattatcatcaggtgcattacagaaaaccacaaatttagcacaaccaatagaatcattttcttttgttaattcagctgtttctttaacaatttccccaattaatttcacagcatccatattaattccagtttttgttgaaccaacattaaccgaactacaaacaagctcagtttcacgcattgcttgcggaatagattcgattaataaacgttctgcttttgtcattcctttagatacaatagcactatatcccccaatgaaattaactcccacaacatgcgcacaacgatctaaagtatgtgcaattttaacaaaatcatctgtactatggcatgcacttgcaccaacaaaaccaattggtgttacagaaattcttttgttaacaatgggaataccatatttcttttcaatagcttcaccagttttcacaagatctttggcaatacttgtgattttttgatatatgttttgacaaagaacatcaatatttgcatccatacaatctaataaactaataccaattgtgattgtacgcacatctaagttctcttgttcaatcattttatttgtttcggcaacttcaaataaattaatcatctttttcctccttagattctatgcattttattgaagatatcttcatgttgcaatttaatattaaccccaatttcttcaccaagtttttctaattcctcagcaatttcataaaattcacccttagcatgacttgcatcaacaatcatcatcatattaaaaaatccatctaaaattgtttgagaaatatcaagaatattaatttgcgcatcagctaaataagcacaaaccttagcgataattcctacttgatcttttccaacgacagttataattgctttttccatttgtctatcatcctccaatattttttaatattatagcaaaccttatctcaaaaggaaagaaaaaaaggagccaagctccttttatttgattattcttctaataatttcattgcacggtcaaatacagctttaccgttcatagttccataatctctcatatcgataacatcaactgggataggtccagcttttcttccagctgctaatttttcgatagctgctttttggaatcttacttgagggccaagtaaaatgcagtcaacttcttctaatactctaggtgcatcagagaatggtaatgcaaagattttgcattcaacaccagcatctttagctgctccttccatttttgttactaataaacttgtagacattcctgcagaacatactaataaaatagttttcatattcgttactccttttctagttatttcactgatattattttaccaacttttccctcgattgtaaacacttacgaagcaatttttttctgtttcagaaaatataaagaattaatcagcaaaaaacgactaaaaatattctgtatttatgaaaaatccctgaataagtatcaagataattgtgataaatcaaagaagaactcatttcaatatgattaaacttatgataaaatagaaacaagaaaagagatgggattatgaaaattttagttattagtgatagtcatttgtttggaaatgatttacaacgtgttgtaaaaaaatatcaacatcaagttgattatatggttcattgtggagattcttctttgccaatggacgatccagtaattgaaaaatttgatgtcgttgtgaaaggcaatcatgattatgctccctatccagcctatcgtattttccatcatatatgtataacacatggtcatctttatcaagtatattatggatatgatcaattaattgaactttgccaacaatatcattgtcgtatttgtttacatggacatactcatgtccctactcatcaaattcatcaaggtattcattttatcaatccaggaagtttaatgatgaatcgaggaagttatgcttatgggacttatgctattttaacaattgatgatgaatccataaatgtccaatattttcatcatcataaagatacattgtgtcctgatacaatattaacagagggtttagatttattagaggaatttaaaactcttttataaaaaaacaagactagcttattgactggccttgtttttttcttctaatcttttacgtttatattcgataataaacataacttcttttaaatcttcatctggtaattctgttaaaagtcgcgcaatattagcgatattataataatcatattttttaccgctcatgatttcttcaacactacgtccataaagatgtgaaagaatttttaattctccaacagtcacatcacgtttcccattttcaatatctgaaatggcagaatgtggaacattaagatgagcagcgacttctttttgcgtcaaatgtttaaagttacgataggttttcaatctttttgctaaatccatatctattgccataatgccacctccatggatttattatatcattaaatatagacgatatcaatttagaattataaaaaaattcatttgtaaaaaagcataaatacaatctttaccatttttcgatattaatctttaaaatatcctgatgttgtttttattttctcttttatttgaggcttatttccatatttgataaatgaaatcatttcatcaaaaacgaattttgtcgtttgttcatcttcatttgtaatatgtataaataatccaccagcttttaatttatctagctgttctaaataaagtgtatggcaatttaataaatgcattcggcattgttcatcacagacaatatcaaaatgttcgttctttcgatctactaaagcaaattttccttgtttacaaatctgacattgtttcttttgataaccaaaataatattgtgatattggacaataatcactaatcatattttcaacttttccatagacttgaacaatacacttagaaagatcagcttgcatttgattgatattttttaatgacatctctaaagaaacaattgttggtaactgataatgatgacaagcataagaattataaacatttagcccagttcctacaattcttgagtaatctttaaaagcatcataagctccataatcattaactaagatcgttttgatattttgttgcttgataattgttttaatttcatcgatttcttgttttttacaaactcgtggagtggctaaaatcaattctttttgatatgtttgagaaatttggtttgctttttcaagatttgattgatatgggcaaacaatcaaaaaatcgggatattgacaagcccattctaattgttcaagggtactgacctgaacatagatttgagttgtttttttagcttcttgaattggtagttgtggtaaagatggcatgtgtttttgatgaatttgttgatgtgataattgctcacttaataaaagaactgcttctcgtcgtaattcattgagttctttaattggcataatgatttgatcatcaatgtcaattgtcattgtttggacataaaatggcgtctggcctaattttgataattgtttttttattctttgttcatcaagaggcgtttttaatgccttttccaccaaagaaggacttttcactgtgatttgataatcaccttgttcaactgttaattgagcattttgtccaatatgtgcataaaaagacatctttatcgcactttgacgatattctttatcatatgttttttgcattttttcaataacttgtttatctatcgtctttcttaccaatccctttgaaacgggaaaatcaaattcaatttcaacagtattccccttttttccctgatttactaattttttattcaagtaaatcttattaacaggcctacctttatcaattttttcaaaaacaatactatctccttgatataaatcttgttgtaataaaaccgacacacgtttatgactacgatcatagtagacaacttcaccaatcacaattcctttattccctgaataatcaccatctaaaagataagtatcatgattcatatatccacttgtataattacgattaaacatagctttcatataggcaatatcttcttttaaatcaacttttttcttagctaaatagctatctatcgcatggcggtaagcttttacaacactagctacatattcaggacgtttcatcctaccttcaattttaaaagatgtcacgcctgcttcaattaacaatccaacatgctcaatcgtcatcatatctttaggagaaagcaaatatggaattttgttttctaacaattgaccatctttttctaaacgatattgtaaacgacaaggttgagcgcatgctcctctatttccactacgtttgccaatcatactactcatcaaacattgccctgaataacaaacacacattgctccatggacaaagacttcgacttctaaagaagttgattgacagatatctctaatttcttcaattgtattttctctggctaaaacgattcttgttgctccaagttgttcaaaataatgggctgcataaggattcataatcgttgattgggtactcatatgaacatcaaaatcaggaaaacattgtcttacaatatcaaacaaaccaatatcttgaataatcaaagcatcaacttgtaaatcatataaatcttggatataagaaaataattgttcaaattcttcatctttatataatgtattaacggttacataaattttaacatggtgtaaatgtgcatactcaacagcccatttcatttgttcatgatcaaaattttttgcaaatgctcgtgcattaaataaagttccccctaaataaatcgcattagcaccattttgcactgcagcaattaacgattcttgatctcctgctggagctaataattcaatatttctcataacttcacctccaaaaaagaagcaataacatgtcgttattgctaaaacgttgaaacaatttcatagcacatcttggcagatgcgatacttgctttttttaaatattcatcaaattgcataggactttctcctttgtcaaaaacatcacttaaagaacgtgtgataataaaacgtttgttaaagacatgacaaacttgtgcaatcgaagcagcttccatttcagcacacatggcttctgggaaagctttttgaatagcagcgacttgttcctttctggcaataaattgatcaccagaagcaattaaaccaacatgggaaggaatattttgttcttgtaaaattccttgtacacatgtcaataatttttcatcaggtaaaaagatacatggcatccctggaacttctcctaaagcacgcccaaaagctgttacatcaacatcatgatgaataacacctgatgaaataacaacatcaccgacattttgatccttatgcaatccaccagctgatccaatattaataacaacatcaatatcataatgagttaataataaagttgtagaaatagctgcattaactttaccaattccaccttgtaaaacaacaacctgatgataattcataactccttcataaaaagtatatccttgataatccttcttttcatatatttcaactaacttcaaaatttccgcaacttcttcttccattgcaccaataataccaatcataactattcctcttttctacaaacaaaaatcactctttcacaatcatcatgatattcatcaaaatcactataatattcaattttttcaaatccaacttcttttaaccaatataaatattgtgcaacactataagtcttttgataatgttcttcatcaacaatctcatgttcaatcttatcttctatataaacatgatgatgaacatatccttcatctaataattcaacattccattcaaaagcaaattcttcatcatcctctttttcacaataatcttttaaaataacattcatcttataaagactatcaatatcaaaaataaatgttccctctgcctttaatgattgataaacattacgaaatgtttgaatgacatcctcaacatctaataaataattaatcgaatcacataaacataaaatcaaatcaacttgatgagaagtcgaaaaatcactcatatctattctctgtaaaatcaaattaacattttcagccatagctttttgtttagctacttctaacatatctgttgataaatcagtcgcaaagactgatttttttcttttagctaaacgaatagccatttcccctgtgccacatccaagttccaaaacttcatcaaatgaagcatgattcatgataaaattttcataatcatcataaaattgtggttccatgagactatcataataataagcaaaagtttcataactcattttgctaacattccttcaacattaatacgaggcatatctccccataatttttctaaattataattttctctttcacttgcttcaaaaatatgacaaacaatatcacctaaatcaattaaaatccatttagaatctcttaaaccttcaacactttttacttcataaccatgtttatcacattcatctttaatattttgttgaattgcatgcatcaatctatcattacttgctgtacacaatacaaaagtatcaaaaattggacttgcatcacgcatatcaattgctgtaatatgagttgctaatttatcatccattgctttaacaatacattctaattttgtcattatatttctcctctcgtaataaaataatcatatatttcataaaaacattcatctatatctcgatgattttttgttgaaaattcataaaaatcaattaaagaatctctaaatccttgatgtatatcttgcttacaaatagcaatctgtgctgaagaatcataaccacgtaaaggatctaatttatctgccacataaacacatttgccaattgcggacatctttgttgaccctgttgtatgatgttcaattgcatctaaaacaactttatcatcaattaaataaacatgttcactcacataacgcgatacccattgatgccaaatagcaaccggtttatcaatatattgtggaaaatgagcttgcataatttggcgagacttttcatagtccatctccttagcaatatcatgaaacattcctgcaatataagcttgtttttcatttaaatgatttgccttggctatttcactagctaactttgcaacactgcatgtatgtttccaacgtttttctttcatttgacttgctacgattgtttctaaataaagaccttgtgatgtgatatatcttaaaacgtctttatctagtaattcaacatgtccctctcttactgcactacttgatgcatcaatgggttcattttttaaaagtgtaaaatgaaaatttgttatttggttcatatcgatttcataaccacctcgatgaaaagccacaagatgaacaagctcacttatttttttagcttctttccatttataaaagagatttgcttgatccattcccataatataataatactcatcatctctatgttcttttattaaacttaaaatagtatcaatagtgtagtttttttcttcactatcttgtaatatctctattgtattaatggttaattgcttttcatcttttaaagcaattttcatcatttctaaacgctcttgctgactagcacaatctttatctttccatggattattttttgttggaatcaattgaacttcatctaattgtaattgttttaaagccatcttagcaatttcaacatgggctttatgaatgggatcaaaactcccaccaaataatcctatctttctcatggtaatttatacaaccctttatcacttgctttatacaatacaattgtatgtccaataatttgaacaacatctgattttgtttgtacacttaattctaaagcaactgtattcacatcatctggacaactatcaagtaatttcaccttaataagttcttgtgcatctaaagcttctaaaacacctttcacttgatttgtattcacaccatcttttccaacttgaaaaatagcatttaaatgatgtgcttctcctcttaaaaatcttttttgttttcctgttaacataacatctttcctttcttatataatagcttctctaatcataactgaaactcttggcggaacataaactctcacctttcctccatgcgaagaaattgtcataaatcctaatcctgaaataacgatatcacatttaccctgaggtaaagtaaattcataagctttcatatcttggattgtatcaatcccttcaatttcatatgttaaagtcatatgacgattatataaatcatctgctttctgtgtttttgtacgatgaatctttaaatttctagaaaaataagcaataaaacttgcttgattaccttctaagtaatcaattcttccaagcccgtcaaaataaattgtttgcccaacatttaattgataaaccattggtcttaattcagtttgtggaatcacttttttaagttcttgaggtttaatcatatgggtcatttgattgtcattcatgattcctggtgtatcatataatttagagttttcatctaaaggaatttcaattaaattcaaagttgttcctggaaattcagaaacagtaattaaattttgttcttcaacttctgcataatgttttaataaagcattaataaaagtagattttccaacattcgtcattcctacaacataaacatctcgacctttacgatatgtatcaattgcatcataaattgtatccaaatttaagtttttcttaccacttgtaataataacatcaactggttttaaaccttcttctttcaactgtctacgaacccaatgttctaattttctttctttgactgatttaggcaataaatcacgtttatttgctaaaaccaaaacatcattgaaaccaatatgacgaattaatccttgaatcaaactcccttgaaaatcaaataaatcaatcatataaacaaccaaacaatctttttcaccaacaagtcctaaaatttctaaaaaatcatctttactcatatgtgtgtcttgtaatctatgataattttttaattgaaaacaacgttggcataaaacatgatcatgattgatagcctgtttaggcacataaccaatatgtttttcatcttcactttgaataatggcgccacagccataacatttcataactttttccatacttaccttccttcgtgactattgtaccctatttcttcatatatgaaaagactaaacataaacatcgacaattttcatatattattttgaggtgaatgattttgatgacactaattgcattcttacaacaattcttatttgtttcctttattaaaacacaagcctttaaaccccaattaaccgcaaagcaagaaagcgaattacttgaaaaatattttcaaggtgatcaagatgctaggaatcagcttattgaacacaatttacgcttagttgcccatattgtcaaaaaatatgagggtggtaaagatttacaagaggaccttattagtattggaacgattggcctaattaaagcagttgatagctataaaagtgataaagcaacaaaactaggcacttacgcagcaaaatgcattgaaaatgaaattcttatgcatatgcgaggaaataagaaaatcgctcttgatgtttctttaaatgaagttttaggcgttgacaaagatggtggagaaatgaccctcttagatattttacccaccgaacaaaaagaaattattgatcaaattcaaacaaatgatcaaatccgtaaacttcaagaatattttactctattaactccaagagaacaagagattcttattaaacgctatggactaaacaaccaccaggtcttaacccaaaaagaaattgcatctaacatgcatatctctcgttcttatgtctctcgtttagaaaaacgtgctctcatcaagcttttaaaagcttatcttaatgataagtaaaagaatatgagaatatctcatattctaaaaatcaccactaaataaatcatcaaaagaaattggttcaaaatgtttatcatcatcttcttcttttggtgactctttttgaacttgttgaacaatttgtggttcaactttttctttgacatcatcttgtttaaataagtttaaatcatcttcaacttcaaagatagctggtttatccaatgtttcttctttaacaatctttaaatcataaagatcagttgataatgcttttggattataaatataattaattatctcatctttacacgctgttaataaacttggtttattcatcaactgtccataaacaaaatctttcacagttatggttacattttgattatttgtttcaatgactaattgatcttgagtttctaaaacaaaagatgtcaaagcatgaatttgatttgttttaggtgatttgaaaacaagatttcctttagttgcacgattacaacttggaatatcagaaatacgtaaacgttttattcctggctgatcacttatcaaaagataagagtctgtttttaaagggttgaaaatattcatagatacaagttcatcattttttaaattcattcccttaataccaccagctttaattcctaagattgaaatttcttcttcactatataagcaagcataaccagcctgacttgttaatacaattccttgacgcccatcacttaatcccacttgaacaagtgtatcaccatttttcaaattcatacatttcattgatttagaataacgtgtcacttcaaaatcttttaattgaacacgtttcatttgtcctaaacgtgaagcaagaataacataaagtggtaaatcaaatgacttcacaagaattgaagcaataaccttttcttcaggtgaaacttttattaaataactaatatgttttcctagctctttccatttaaattcttctaaacgatgtaatggaatatataaataatttcccttatctgtaaaaaccaataatttatctaatgtatttgcataatgaagatcaattaaaacatcttcatcttttttaccaaatggtgtattttcactagctttataagatctttgagagattcttttaacataaccatctcttgtgactgaaacataaatatcttctggtaaaatcattgcttcttcattaatcgtaatttctaagacttcatctttgatttctgttaaacgaggtgtaggatattgttttttaatctgttttaattctgaaataataacttttcttaaaactttatcactttctaaaatttcatgtaaacgtaaaatcaaagcttctaattcatttttttcgttttctaatgcaacaatatcagtatttgttaaacgatatagttgtaacatcacaatagcttctgcttgcctttctgaaaaaagatattgttcttgtaaatttttcttggcatcttgtttatctttagaatgacgaattgtatgaaccacttcatctaaaatagaaacagccttgattaaaccatcaacaatatgtttacgttcttcggctttttttaaatcataaagcgaacgtttggtaataacttcaatctgatgttggatatatccatcaagaatttcaacaattcccatacaaactggtcttttatttttaatagcaaccatattgtaattataatttttttgtaaatcagtattcttataaaaataattcaatgtattttgaacatcaacatctttttttagatcaatcacaatacttaaaccatttcgatctgattcatcacgtacttcaataattccatccacacttttattaaaacgaatttcatctaattttctaacaagttcagctttattgacctcataaggaatttctgaaacaataattttattaatgtttttttcttcaacaatttgtgtacgtgaacgcacaacaacctttccttttcctgtttcaaaagctgtgcgaatccctttctttccttccacaatcgcaccagttgggaaatctggtcctaacatataattcattaaatcatctaatgtacaatgaggatgcaaaatacgatgaattgttgcatcaatgacttcctctaagttatgtggtggaatgtcagttgcatatccagctgaaataccagttgctccattaacaagaatatttggatatttagctggtaaaacagttggctcatattcagtatcatcaaagtttaaagccataagtactgtttctttatcaagatcttttaataactctaaggcaattggtgacaatcgtgcttcagtataacgcattgctgcagctggatcgttatcaatcgaaccgttatttccctgcatatcaacaagtggaatacgcattttccaatcttgtgataaacgaaccattgcttcataaaccgaagaatctccatgagggtgataattcccaataacattccccactgtcttagcagatttacgataaggtttgttatgggtatttccttctttaaacatagcatataaaattcttctttgaacaggttttaaaccgtctctcacatcgggtaatgcacgatcttgaataatatatttagaatatttaccaaaacgatcacccataatatcatctaatgattgtgttatgattttttctttcatgcttaccctccttattgattaataaagaatgaatcttctaatgagaattggacattatcttcaatccattcacgacgtggttctactttatcccccattaaaacagaaacccttctttcgactaaagctgcatcttcaattgaaacttgaattaacgttctggtttctgggttcattgttgtttcccataattgatcagcattcatttctcctaaacctttgtatctttgaatagcataaccacgaccaatttttttctttgcttcttctaattcatcatcatcccaagcataaacaacatcttcatgttttccactctttttagaaactttataaagtggtggtaaagcaatataaactttacctgcttgaattaaaccacgcatataacgatagaaaaaagtaagtaataaaacttgaatatgtgctccatcagtatcagcatcggtcataataatgacttttgaataattggaatcatcagcattaaaatctgccccaactccagctccaactgtattaataatggtactgatttcttcattttttaaaatatcagccatagctgccttttctgtattaacaaccttaccacgtaatggcaaaatcgcttgatatttacgatcacggccttgtttcgcactacctccggcagaatccccttcgaccaaataaagctctttacgcttcttatcttttgattgcgcaggtgctaactttccactcaatatcttttcgactttatttccttttcctttacgggcttcttcacgggcttttcttgctgcatttcttgcttgtgatgccttaatcattttattaatcaattgattagcagcttctttattttcttctaagaaataattaatttgttcataaacaacattttcaacaatatttcttgcttctggtgttcctaatttagattttgtctgaccttcaaactgaagtaatgactccggaattttcaccgaaataatccctgtcaatccttcgcgaacatcactaccttctaaatttttatctttttgttttaacaaaccgtattttctagcatattcattaaaaacttttgtaaaaccagatctaaaaccagtttcatgtgttcctccatcacctgttcttacaagattaacaaaagaaattaaattttcttgatatccatccgtaaattgaaaagcgacttctacctcaataggatttgagacatcatcaaatgaaactgttgtatgtaatgtttttttatcataatttaaatattcaataaatgcttctaaaccattttcatattgaaaagattcatgtttatcagttctttcatcaatcacattcatttgaatgccttttaataaaaaagcactctctcttaatctttcacaaattgttgaataattaaattcaattgttgaaaagatttcagggttaggtttaaaatgaatagttgtcccagttttggttgtttttccaatgactttcaatttagaaattttcttagccccatcttcaaatctctgctgatgaatttttccatcacgataaacagtcacttccaaccattcacttaatgcattaacgactgatgatccaacaccatgcaatcctcctgatgttttataaccaccatcttcactaaatttcccaccagcgtgaagaatcgttaaaataacttcggttgttggtttccctgaagcatgcattcctgttggcattccacgtccttcatcttcaactttaatactattatctttaccaatagtgacagttattttattaccataacctgccaaggcttcatcaattgagttatcaacgatttcccaaataagatgatgaagtccacgataatctgtagagccaatatacatccccggtctttttctaacagcttcaagaccttctaagatttgtatgtttgattcatcataatgattctttttcattgatgatttcctcctttcgcaactcattaattataccaaaaaacttttctttacgccacatgattttatgacttccacctaaaattctctttttatttgttttatcaatcctttaaaaagattgatttttatgcctatttatgtataattatgaacgaggatgtgaaaatatggacgtatttatttatatattattaattttaatgagttatttatatggctcaattccatttgctttggtcattggaaaattattttatcatactgatgttagagaaagtggctctggtaatcttggaggaacaaatgctggtcgtgttcttggtaagaaagctgggattgctgttattatcttagatgcttcaaaatgttgtatctcagtcttattatcacaaacaattgctgctcacatgggattaaatgctgatattatttatccttgtgctttggcttgtgtgattggacattgttatcctatctttgcaggatttagaggtggtaaagctgtttctgtagcgattggatatgctcttgttacaaatatttatgcttttattgttgccattgttgttttcttaataactctcaagatttctaaatatgtatcactttcttctatcttgggttcgacaacaattttattgatatcaccatttattggctatagtcatgtgggaatcttaacaaatgcttgtattgttgctttattgatttataaacataaagccaatattcaaagaataaaaaatgggactgaaaataaaattacatggatgtaaaataatgattgagtgaatgaaaattcactctttttttataaaaaaagaagtatcactgatacttctaaaggacaattaacttatttagcaaaacttgcattcattacatatggtaaatagtcatgttgattataagataagacttggtaatcttgtccatcatattcaacacatgttagtgaacacccttcaacaactttttgattaatttggataaaatcttttctttctaaacgcaacatcacggccaacataataataaaatacattccatgtgtcacaatcaaaacttgactttgggatggcaactttgttaaatcattcaaaaaactattcactcgtgcaatcacatcatcatagctttcaccattttgaatacgtgtaaaagcttcaggatgattccataagttatcataaatttcatgatcagttaaatgaatatcagcaatcttacgaccttcaaaatcaccaaagttcatttccattaaacgttcatcttgaattaatttgttttcatcaaacaataaagatgctgtatgataggctcttaatatgggactagtataaatataatcaaacttcaaatgagaatcatgaagatatttttttaatgcttgggcattttcaatgccctcttgagttaaaggtgaatctaaacgtccttgtaatcttttttcctgattccaaagcgtttttgaatgcctcgtcaaatatattttcatataacaaaaaataagggtctacccttatttatattgatcattgatacttttcataattctcttgatttgagtctcgtttggtttacgtcccatttccataaacattgcacgaatcattttttcattaattggtggattcttctttaagtttttcttgaaaacataacgagaagcaaagaatcctataacaagacccacagcaagtcctaaaaatccatataacatttttcaatcctccatttcaattactcgtctattatagcatagaatgatttcatttgtaaaaccaattatgtcataatcatataaaagtttttagaaaaagccttcattttatcaaaaatgatatgattttgaccattttcttcaacatctatatcatattcattcattgttagtgtcactttatcctctgtaatgggattatataatagatgtattccatgataataagaataatcatctcgttgttgaatagattttaaaagcttttctttttcttctcctaatggtttaaatattaattcaacctgctttgtttcatatgtattattttgatgagtatataataaatcaaccaattgaggataaacatcaaccatatcaacatatttatcttttaaacaaacaattttatatttcatatttcatcaccaaattcattataattgataaacactttgaaatttgtcaaaaaaggttccaaaacggaacctttttacgattatttatatttatcttttttctcataagttgtatgcaacaaactatgtgccaaatgagagtttggatgtcccaagaaatcttcataaagcttttgaatttgagtattcttatgagattttctagctggcattgcacgatcttcatcatataaggcttttgctcgagcacctttaaaatcaaaaccactattacgaatcattgcattgacataagattgtcctccaccattgatacatccacctggacatcccataatttcaatgaaatgatattttgattttccagcacgaatatcatctaataatggtttagcaatctgcatactatgtgccacagcaacattgactgttaaatcaccaacttttaaacttgcttcttttaacccacgttgtcctcttactgcatgatattcaatattatctaaatcttgtgaagttaaaacatcaacaactgtacgtaaagcggcttccataacaccaccacttgctccaaagataacagcagcaccagtatattcaccaaacatatcctgatcaaattcttcatcttttaaatcaacgaagttaactccaaacattttaatcagtttacctaattctcttgttgttaaaactgcatcaacatctttcatttcatctttgatcatttgtggtctttctttttcaccttttttagcaacacaaggcataatagagacaacatagatattctttggatctaactgatatgttttggcatagtgtgatttaatcattgctcctaacatcatatgaggtgatttacatgttgaaagatgatctaatagatctggatattctttttcacaataattaatccatcctggcgaacaagatgtaatcattggtaaaacgccaccttcttgaacacgatgtataaattcatagccttcttccataattgttaaatcagccccaaagtttgtatcataaactttatcaaaacctaaaagttttaaagctgcaaccattttccctgtcacacgcgttccaatcggcattccaaattcttcacctaaactcgctctaactgctggtgcagtttgtacaacaacatgcatatttggatcatttaaagccgcaataacattatgaatttcttctttttcatgtaacgctccaactggacaaacatttatacattgaccacattgcatacaattaacatcattaaaactacgatcaaagactggaccaattttagttttaaaaccacgttccataaaatctaaaacacctaatccttgatgtttttgacaagctgctacacagcgtccacataaaatacatttcgaagtatctcttactacacctggtgaaacttcatcaaatgtaggtacagttttttgccctttaaatgcatcttctcttactcctaattcttgacatagtctttgtaattcgcagtttgtattacgaatacaagataaacaatccttagagtgattagaaacaattaattcaacaacacgtctacgcgcatctaaagcccgcatagaatttgttttgacaaccattccctctcttacaggatatacacaagcagcacaaaggtttcttgctccttctacttcgacttgacaaacacgacaagcccctgttcctgtataatcctttaaataacataaagtaggaatatgaataccattttctcttgccacttctaagattgtttttccttcatatgcttcaacttggcgattattaattgttaattttatttttcccatttcatccacctactttctagaaatcacattaaagtgacaagctttgagacagttaccacatttaatacatttatcctgatcaatatgataagctaccttaccaagttcaccatcaatagcatttgctggacattgtcttgcacaaagtccacacttacgacatttatcagcatcaatttcatatgataataatgctttacaaactcccgctggacattttttatcaacaatatgagcaatatattcatctctaaattgtgaaattgttgataaaactggatttggtgctgattgtcctaatccacacaaagctgtatctttaatggtatgagctaatgtttcaagttcttcaagtgattccattgttcccttgccatcacaaatatcttccaatatttcaagcatacgttttgttccaatacgacaaggtgaacatttaccacatgattcatcaacaataaaatccatatagaatctagccacatcaaccatacagttatcttcatctaagacaatcattccacctgaacccatcattgagccaagcttaatcaattcatcaaaaccaattggtgtatctagttgtttttctgttaaacatccacctgatggccctccagtttggactgctttaaattgtttacggtttggacatcctccaccaatttcataaataacttcacgtaatgttgttcccattggaacttcaacaagtccagtattagtaatcttaccacctaaagcaaagacctttgttcctgatgatgattctgttccaattgatttaaaccattttgcaccattaataataatttgtgctacattggcataagtctcaacattattaataattgttggttttccccaaacaccactatgagctgggaatggtggttttggacgaggcattcctctttctccttcaatagattgaatcaaagccgtttcttcaccacaaacgaaagcccctgcccctaaacgaatttccaaatcaaaattaaatcctgtaccaaaaatattttcacctaataaacctaattcttttgcttcattaatagcatgtttcaatcgttctacagcaattggatattcagcacgaatataaatatagccataatgagccccaatcgcataagctgcaatcgccatcgcttcaataacactatgtggatttccttccaaaattgaacgatccataaatgccccaggatcaccttcatcagcattacaaataacatacttttctaatcccggttcatttaaggcaaattgccatttcaatccagtagggaaacctccaccaccacgacctctcaagccactctctttgatttcatcaacaacttgttgaggcgtcatttctgttaaaaccttacctaaagcaaaataaccatccttagcaatatattcttgaatattttccggatcaatcacgccacaattatgcaatgcaatacgcttttgtttagaatagaattttgttttgttaatatcatgaatttcatttgtctcttgatcggattcattaagcatcaatcgttgaacaggacgtcctttatagaaatgttccatcacaatttctttaacatcctcaacttttactgatttataaataatattatcaggataaatagacacatttggtccaaccccacaaagtcctaaacatccagtacgtaaaacacttacttctttttccaatcccatagatttgatttcacttttaaaagcttctatcaaatcaccagaatttccaatactacagcccgtaccagcacagaccaatacttgtattctctccatgtccatccctcctacttcttatatttaccaactgtatattcatcaacaacttcatcattcattaaatgacgcaaaacaatttcctttgcttttttggcatcaattaaaacatatgttgttttatgatcatctttatcatagacttcaacaataggctcaagtgtacacattccaatacaacctgtttgtaaaactgtaactggtaattttgctttagcgacttcttcaacaattgtatttaagactggacgtgctcctgctgcaattccgcatgttgccatacctacaacaacacggtattttgtatcatcttccatacgcattgtcattttattttgcgcagcctctctaatcttttttaaatcctctagtgatttcattttcttaatccctccttcatataatctttaatccataaaaggacttcaggttcagtaatctttacatcacctagaatctctttcatttcctttgttttcatttcaaaagaaaattcatctgttatatatacaaactcataatcaatttgatcattcgcttgaattaaggttattattgtatcaatgatattacccattacaggcgtatcaatatgatttttgacaaacatcgcactaacatgagttccttgatgaagttttgaattcatttttagataaccaccagttaattcagcattttgtttaaaaagtggaatccctaaaccaactttgcgggttgttctagttgtataaaaaggatcagttactttttctattgtttctttatccattccacacccattatctatgatatctataagaatatgattttgattcacactatcttcaatacgaatttgaatgagcgttgcctttgcccgaatagaattataagctatatctaaaatgttcaatgctaactcatccatagcgcttcctccataaaccaaaaaattctttttcatcaaattgatgaataggttcactaatcatttctaaacgatgggcatcactattcattaaccaaaattgattttttaaataaggaaatttttccatcaataaagtttgatgatcctcttttgtcacttctattccatcaatatctaaatcttcatcaattctcataaaaacattcatgattgaaaatcgttcactcatagcatgtgccaaaatagcaattccgcgatgatgatgaatccaatcaataatctcaactaatgataaatccaatgatttaatcaataaccttctttcttcattcacgacttcatctacttcattaaatatatattgatgaccaaaataatattcatcattaggttcttcaattaaataacaatcaagaaacgcttgaaaagtatccaataattgtttatctaaaaaataagctaacacatgaatttcttcacgactttgaatttcaacaccataaataaaacgaatcttatcctgagccacatcagctaaatgataaagttgtttgactgaattatgatcagtaatggcaatcaaatctaattcttttaaacaagccatattgacaatattattaagtgtcatatcatcatcgctacaaggcgataatgccgaatgaatatgcaaatcataaaacattcttatatacctgctgcatttaattttcgaatcagagtataagcatcatccttagttgaaaataaaggtaaatctaattcatttgcttttgaaattgcttcatcatcaggcataagtccttcaacaaaaataattcctgaaaaatctaacatctgggcaactgcaatagcattcacatgagtttgaacagttatccataagaattgttcatccgctttaccaagaaccatacttaataaatcaccaacatacataccttggacttctcgatcaagtgattgttcattaataagtgttaaatcaaccttagaaacaatttcttttaagtttttactttcatctaaattcatttctcatcacctttttttctaactcgacaaacttgaatatcaactttatgatcaacaatactttgagctaggctacgacaattagcaaaaccacatgccccacaatcatattgaggtaataattctaaaatatcattaactttagcaaaccaagccattcgttctttcattgataacatttcttgatgatctaattgacgatgaatacgatattcctcatcatttaacttaagatcacttaatgtatattgttccatcatactttcaatattgtaactgccttcaaaaggatttgaccataaataatagccaccaatacatccttgataacaagcaaacatcgcaactaaatcaatgtgttgaatttgatcaaattcaattaaatctaataaacttcggctttgatttaacccttcaactctaacaatagacatactcctatttccaaataaatcttcaacattacttttaacgccttctctattcatttcaattggatatttttgattactttttaatttattaattttaggaaagacatgggaaattgtcattgcataatcaatagcagattccatatttccaaaaggttctttagctagcatcatttttcctacacattcacataaagaataaattccaacatcttgaccttgatgtttttttctaattcttcttgctgcaatttctacaggataatcataaggtaaaatacgatcatataatgttggataatttttttcaatcaattgattgatggttggacaaaatgaagtcaaccataaaccaggtttttgatgactttcctcaatagctttattatacaaataaccttcaatgtcactatattgttcaatttcatcaaaacctaactctaagatagcttgacagattctttgaaaatcttcataagatttcatatcagataataaactggttggaattaacgcaatattatattgatgattcttcatcgtctcattcatatgagcactttgaacttttaaaacacgagatgggcagttttgaatacaaacatcacaatgaatacatttgctttcgtcaatattcacttggtgattaacaattgaaatagcatccataggacatgattttaaacatttaatacaatgagtacactttgtatctaaataactaatcactggtttcatacaaaactcatttttaaatgtgtggcttcttttgaagattgaatatcaaatgttgaagcacaatttttcatattatcaagtcccattcctgcaccaaaaccaaattctctcgcttttttagaagctgttgaataacccggtgtcatcgctagttcaatatctggaatacctggtccgacatcatcaaaactcaaatgaacgacaccctcatcatcgatttcaaatgtaattactccaccatctgaatgaataaccagattaatttccgcttcataacatgcgattgacactctttttaagacctttggatctaatcccaaagtctttaatgtcatttttatatcacgtgaagcttgtccagcatcttcataattatctttttctatttgatatgtctttctcatttgcctaaacctttttcatataaacgaccacatgtctcatacattgtataatttgttacaaagacactcacattactcatctttgcgccttgaatcatatgctcatcaattgtttttcctcttacaattaggatagctgctaaatctaaagtattagcagtatgaaagatttgcatattcgctaaaccagtaatcaataattctgtctcatcagcatctcttaaatgacatagggcatcagacatcaaatcagttccaaaagcatcttgaaaatcaatttcataaacatgagggctatcaatataaagttctcgaccatcaacaatatctaaaatttcttgaagtttcatgcaggtgcttcctcttttttataattcaataccagcatcttcaaatcttccaactgtttcgtacatccaaaaacggttccatccacacttacaacaggtgccaatccacatgcgcccacacaacgtgttgcatctattgaaaagataccatcagcacttgttccattaactggagctcctgtcatttcaactaacaaatccaaaattgtttgtgaaccattaacataacaagctgttcctaaacaaacactaataacatgttttcctttaggttcagttgtaaattgcgaataaaatgtcacaacaccataaattttagaaatagggatttgtaaaacttcactcattctttccattgcttcaaaaggaatatatcctaattctctttgaacctcatgtaaaataagttttgttggacccttttcatctttatgcttatagattgtatcatctataaaatctaaagacttttgattcaattttttcatactttcacctcattcttttaatctatttttattataacataggtacgcaaaagaatgaaagcgttttctttatgaacataaaaagaaaaactgctaataaatattagcagttcattttacattgataaaaatgtattcacaacattttctacagtaaagccatatttttcaatgacaatatttgctggagcacttgccccaaattgattaacagaaatcatctttccatctaatccaatatatttataccaaccaaaatcagtacccatttcaactccaagacgttttctaacatcttttggtaaaacagactctttatattcatcactttgttgatcaaacaattccattgatggcatagaaacaacacgaacatcttgtcctttttgttttaattcagcttgagcttttaatgcaagttcaacttcactaccagttgcaataataataccatctaatttttgatcttcttttgaaacaatataagcaccatgacatacgtcctcatatgatgcatttgttacatttgtaacattttgtcttgttaagattaaagctgttggacgatcatttgtttccattgcttttttccatgctgcacacatttcaaaggcatcagctggtcgaatcacttgaatattaaccattgagcgcatcattgctaattgttcaactggttgatgcgttggaccatcttcaccaacagcaatagaatcatgagataatggtaagacaattggtaaatgcattaaacatgccattcttaaagcagctttaaaataatcactaaagactaagaaaccacccgaagcgacttttacacctttatgtaaagtcataccattcataatagataccatcgcaaattcacgaataccaaaatataaattacgtccactataatcatcacagctaaaacgttgtccatctttaattgttgtttttgttgatgaagctaagtcagctgtacctgataagaaagccggattttgttttgcaatttcattaatgattttttcacttgtattacgtgttgcttcacttaatccttcaggataatcattaataaatgctgaataatcaaatgtataatacccttttacatcatcagataactctttataaagttcaggataaacattcttatactcacgcatcatctttttccacttattaaagcaacgttttccacgattgaaaacatttttacggaaatcttcataaacttcttctggtacaaagaattcttcatggtcaaaaccataagataatttagcagcttttccatcttctttacctaatggtgcaccatgtactttacttgttccttgatttgcagaaccataacctataactgtatcaacaatgataagagatggtttaaagctttctttctttgcttttttaattgcttttaaaatagccgcaacatcatttccatcattaacacaaataacttgccaattcattgcttcataacgttttttcacatcttcactaaatgaataatctaatggtccatctaatgttacatgatttgaatcataaagaacaataagttttccaagtgccaaatgacccgctaaagaagcagcctcataagtgacaccttcttgcatatcaccatcaccacataaagcatatgtataatgattaacaacttcaaattcatctttgttataacgttctgttaaataacgttcagccattgccatccctacagccataggaattccttgacctaaaggcccacttgaagcatcaacaccatcagttaattctacttctggatgtcctggagtacgacttccccattgtctaaatgattttaaatcatccattgataaatcaaaacctgataaatgcaataaactgtataataacgaagatgcatgcccactggcaagaacaaaacgatccctattaaaccaatctgattcctttgggaaaacttttaattcttttgtaaataaagcatacaacgctggcgcagaacctagaaccattccagggtgtccagaattagctttattaatcatatcaattcctaaagatctaattgttgctatcgataattccgattgattcatttccttattttcctcctaaacacactcacggttattatacacaaatttaatacaatagcaaatacctatttgacaattttctgcattttaattcattttttttgctttttttaattttcgtggagttacatcattgcccttttcatcaacaactttaatactttgaagttgttgcttaaatccacttctaaatatacgtaaatattcttgtcttaattcttgttgtcttttcttttcttcctcagttaaaccaacagttttactcttatgagcaagtgcattaatttcttgaatcatttcatcactgattttagccatttttaatcctcctaaaaaaagaaagacctaagagttttttagattaaatccctggtatatacaggtaggcatcttgtgttcgattttaggattcctattcaagataggctttcaacaccatcgaccaacaatcagattcccttatctatcgtgtaggaaatacatatatctcttaggtcaatcacattatagcataaaatttaaatctgtaaacaaccaattcataccaaatagttgagttattattttcctaacaatttcttttaaaaatcatatattatttttaaaactttgaaacgaagattattaaaaaagcaaaagaccaataaccaacaaaaatgacctattggccattttcttttggtttaatcatacatgtacttaaatatttcttatcaaaaagtgattttaattgattaatatcatcaagtgataaagatgctaaacaatcaatcaaatcaaaaatcataatcccttcaaaataataacgactaaacatatttgcaatactttctgggctattaaatacaccaattaaaattccaatgtttttcttttggactctttgaaaatcagcttcatctatttcaaaagaatcaatcgattcaatcaattcataaattttatcacgtaatttttcaggttcttgcgtatcgccaccaatttgtaagaaagaataatttctttcttgagtaaaatttgcgctaaaactatcattaatgaacccttgacgcatccaatcctcataaagcttagaactttttgcaaaaagtaaatctagtaataaattcattgataattcacgttttaatttttgtgaaggttccgttaaaatatcattaattttcatagagacaattaattttggcatcacaacatccatatttaaaatcaattcatcctgatcaacatcttgaggttcatcaacattctctctttgaatttgattttccttttcaaaatgtttctttgcttgattttcacgaattaatgtcatagtcttttgtggatcaatatttccgacaacaaacaacatcatattactaggatgatagaaggtatgatagcatttttctaaagtttctttatcaatttcacgaacagtatccacagttcccgcaatatcaattttaaccggatgattttgataaagattttggatacttccaaaataacaacgccaatcaggatcatcatcatacatacctatctcttgattaataatccccttttctttttctacattttcctctgttaaataaatatcttgaacaaaatctaataataattctatacactcatcttcatgtgttgtggtactaaacaaataagctgttcttgatgaagaagtgaaagcattggtacttgcgcctaatctagcaaaaccatcactagcatccccatcttccatttcaaacattttatgttcaagaaaatgagcaattccatcaggaactttcaacatttcattttcaccaattggcacaaaagttgtatcaatagaaccaaaacatgtagaaaataaaccatatgtttttgaaaaacctttttttggcaacaaataaacttttaaaccgttatccatttcttcaaaatataacgtttcttgaagtgtttgataattaattgttttcatcgaaatcctttcctgtaaggaagaaaatagtatctaaacgcacttgtttagccactttaataatatcttcttgactcacatttaataatttttcaatatattcatcatttgactctaccttatgtgtaatatctctattataagttagagcaatcatactgccagcttcatcacttgtttttcttaatgaattttcaagcatcattttagcaacatcaatatctcgtttttcaatttgtccatcttgaatagcttttaattcctgttgaattaagtccattgtcttatgataatctttagcttcaataccagcattcacaatcataattccattaaatgcatcataacttgatgaaacataataacataaactattttcctctctaacgactttaaaaaggcgtgattgtgaaaagccaccaaaaatcgcattaaatacagtaaaagcatagtgttgttcagatataaagtcacaatcaatttgataacctaaatttaattttgattgagtaatatcttgtttctcaataatttccaagacatcaggatgttgactcttaaaagtatacgctgatggataatcttgatgattttcaggaaacttcagatattgttgaaaaacatcaacaattgtttcatctacatctcccacaacataaatatgtttttcatcttcttgaatacattttaagaaatactgatatagcatttttccatcaatttcatcaatcttatcttcataaccagtacttggaatacctagagtttgatttcttcccatatgttcaaaaagcttatctaatgaataggaaaatttatcatctttattgacttgtaatctttcttttaattcttttttctttaattctacaattgtttgatcaaaagcatcattttcaacaaaaggatcaaaaaacaaatcactcaataattgaagttgtttttctaataaatgttcttgatggggtaaataaacatcattgacaaaacttgtataaagattaataacttgagattcaccctttgttgcaacatttgttgataaacgagctccataattttcatctaaataacttgcgagaaactttgttgatggatatttttttgtagctgcaattaaaacaaaggttaataatgttcttaaagttgttgtttcttttaataaaggactttgcaaacgcaaagatattgtcattgttttaaatttttttgtagggataagatgtagcgtatatccctgcatttgatatacagttttcataaatcctcctttttttcacatattactattatactcaattttttacaaaataaaaataaaaaagaccaagactttcatctttgtcttttttacatagtaagcctttttgtctatataaataatttatcttttgcatatactatacccaatcatactttaagatgagaatcctttgatactcaccttaaaccaaccttgtaattcgttaatatattacattagtacatatattaactactcacatataaattaaacatttatttaaaatacagcacagcttatatatttgaataaacaataaaggtactttgagatatttaacataatcaataagatttaaattaatatctatgttcttatattaagaatatactaatctacattattttgattaagcttaaaaagattcacaaaaaaattcattatgtttcttaataccaactgataatctctttgatttaattctttattaactcttatctaaaagtataccaccattcaatatatttcatttgttattcttaattcattcattacatatatttatttcctttttattattcattcctcaatacttgtattggttgaagtctataagtcattatactaataataatacctatacccagtagtaaaatactttcaaaaagcaataactccaataaagaataattaacaaaccaataaattcctacactcattataatgaaactcaaaatattcataataaatgattcaaataaaaccaatgtgatgatattcatatttgttaagccaatacattttaataatgcaaactctttttcacgagtatgaaaatatgatctatataagaagtataaagtcattaaaccaaaacaaataagacatgtcattacaattttttgaattgtatttaacatttcaatataactaatgatttgatcataatcactaaatgtagttactttataattcagattctctaatttaagtttaagttctgtaaaatcatcaatattatgacaaaatagagtatatccagatatttctgttggttttaatttttcctctatcagtttttgatgcatatatataaattcagatgaatcaatatattcagatgttagtccctttaaaagtattcctttataaagcaatgatatctcaatatggttatttgtatcataaaaattgatagattgggttggaacaatcaagtggctgtttttataatataacttatgactgaaataaaagccttgttctttagataaatcaaatcttgtccatatcttattattaatatttatttcatcataataaggtacaacaggatatgatttatctaaaagattcagcgaaacattataatatggataataagaatctattttaagtttatcaatatcttgcttttgtaaagatggaacatacatccatcctggattatccttagaaactatagatttactttctgagataaaattatttgtgacttgagaagtcactagacaaaatataataatcattatattaacaaaagcaataaatatcttcattttcttagaaaaataatattgttttttcaaataattaaaatatgtttttaaaggaaggtgagttcctttttgaatgatttttattggtttttcttgtatatccttagaaactatttttgtaatgataccatcttcaatttgaacaacttcatcacaatactcacgagctatttgattatgacttgttataataatagtcttttctttcttaagttctgatagaatttcaaatattattctagcattttctgtatctaaagcacttgtaggttcatcaagtataagtattggtgtttctttagttaatgcacaagcaatagctaatctttgtttttgtccaccagacattgcataaagtgatctatctaatgggatatctaaatgaactttatgcaaatattctttagctttatctgctgatatttcattgcctactaaagaagcataatactgaatattttcatatacattgaaatgatcataaagaatataatcctgaaatacaaaagcaatatcatatcttctcaaaatagtttttttcttatgatgaaattctgttatatcggtatcatcaatctgatatgaacaatctttcttatgaaaatcaattaaacctaacttatataataaagtggttttcccacaaccgctttctccaactaaaagagtcaaacaattattcttaatttctaaattttgattattaaaaagtggttttgcaaatgaaatatttaaatggttaatttttaacatgataaataccctcccataaaataggaataatcgtttgacttatgatagaaataccaataataacaagccatgatttgatattaataatgtatggagtatagtaaacataaatagaaatatagttcactatccataatagaacatatgatactatagctgttatcatagcattcaataaatacttctgtaactttactttaataatatctttcttacgataatatccaatatgatttaaccataaattcaatttctgttcttctttaccttttaaaaaatgaaaaccacttactattagaatagtgaaaaatagaaaagaaaaactaataactttagccatttctttagtcgaacgaatagattctgcataactttgatattgattatattcccagtcaactgtataccctaaattttctagttcattaactactgactgcatattctctatatgatcaattgcaacagtataagcgttaggctgccaaggtgtataaacaagaactaaatcagcatctttttgtgattcaacttcaatcattccatcctcagtatctttacgaaatactgtataacctttatcaacaggatttgatctagctaaggcttctaaagaatcagaaagcatatacattgcataatcagatgtaacgagtgtattactttcatatcctgtttctaaaattccattgattggaagagataattctactgattgacaattaataagattagcaggactaaaatcatcgtcagcaaactcttcttccatctcacctgaaggtatagtgatttccattgctcctgaaacatcataagttggaataccaacctttatctttactaagcaatctttaagatcatctgcttttaattgaagtctattcaataaactttgatttaaatataaacctttttcatgtttatcaaaggaataagtctgatacttttcaatctcagtctcttcaattccctctataaaaagattgtaataattataattgttatcagattttaattgctcaattgtatcattataattataaatttcttcattatctttcaaaatatgaaaagatggtaaaatttctttaacagataattcatctacataagttgataatataattttgggcttgatttgttttatgtgctgtatgtctaagatactcttttgctcaatatctgtaataggaaaataagtcgaactcgttatatcaaaattatatgttggatatctagaatcaagtgatttataaacaagtacactttggttattttttgttttcaaattttcttcaaaagaacttaaaaaaccattatctatattagtagaaaacgcacaaatcataatggctaatgaaacaagaagacaagtaaagatttctttaaatatatggtgctttttcattataaaaaaatatagaatccagttgatattattttttttcaatgcatcaattgtaaattctttttcttgtacttgagaatcttttataagatgaaatttttggtcctttatttcataaattttatctccttctttaaataaataaggatcatgagttgcaataattaaataacttttctcttttaatatatgcaataattgaataaacttcgttttatattcatcatctaatgaagctgttggttcatccattaagataatttgtggctgaataataaacatattaataatcattgctcttaattgttctcctccagataattgtgaaggataactagattttttatcatcaagtcccattaaagaaataaattcttccaattggggatgcgcagaatacatttttcttagcaagctccactgttcatcaagtgtcaagtcataacaaaatatcggcttttgtgacatatagtaaagatgatcctgataattttttttattttcttttatctttaaatcaagattatcaaaataaaaatcacaatgtattccatattttaacgcaagaatatctaataatgtagttttcccactaccactttcacctttaataatagttagttctcctattattgcagttaaacgagtattatcaaatattgtttcttttccataactaaaacttaaatctcttacgtccagcatatgaaaactcctttctaaaaagcatatcaattgttattgatatgcttacaatgatttattgaactgtcaatttctttgttgatgcattataagtaaataaaactggtaatgcaattctaatacataaacctaatttttggatagtttcgttttattatacttttttgaaagcgcttttattatctttattatagagtcaatatattattttgtcaataaatcaacaaatacattattttttatttgtttttctgtatattttcttcatattaattctgttaatttttttacttaaatccatattttccctctttattatctgtccattgttgttaatacgtttcaaatacagaaaatgtatgtatccttgatgaatattaccataaaagaaataacttataaaaaaattcatatatagtttcttcataacatttcatcttctcttatgattatacacattatatattttataactttttacagattatgtttacatttttggcacaactgacatccttcatttttttagcataagtattaaaaatatattaacagaaacaaattatgattctatattagagaaacatagatagacatatctttactgtcatatatttaatatttcactaattagttatagttatatcattagtcggcctttccaatgacttactgccaattatctaattatccttagcatacttaaactaatatcacttgttacagttttaaaaagttttattatgaatgatttcctgttttcattaaaatgaaatgccttttatacatacttttaagctcgtcaacaattatttatagcgattgtgatatagcatttttctccttgcttattgatacaccaagaacaattttattttctagattttcactcgttatttttgttaattgaatcactattccgcatagtgccaatttcatctgaaaaatgaataataatataaagaaccaaaaaaagctcacggattcagatactttaaaaacttataaaaaagaatattcatgcacttagattatagttatatattcaaatacaataaagctcaaaaagagtagttatcactacgtgatagctactcttttaattcttcactcttgacacagagttatcaattcatttatcgttttcctttatcaaaaggttctccttctgcacgtggtgcagcagaattttttgaagtaaaggctaataaaatcaaagttgcaacataaggaattaacttataagttgtagctggtaatgataacgctgctaaaaatggaacagagttatatgtataagcaatcgtctttgttgcaccaaagaagaaagctgcaccagcgattcgccaaggtttccagttaccaaaaatcaatacagctaaagctaagaatccatatccagccacattacagttgaattctgtactgattggtaaaatataaatcaatccacccattccagctaatacacctgaaataacaactcctaaataacgcattttataaacactaattccagctgcatcagatgcttgtggattttcaccacatgatcttaaacgcaaaccagttcttgttttcattaagaaaacataagaaacaattaaaagaccaattccaataaaagttgttaaataacaattattaaagaacaaatcaccaatcactggaatctttgataacaaaggaacttcagcaattctaaattgattttcaaacataacactttgcacaccatcttgaacagtcttagcaataaacaatcctaaagcaggagcaaataagtttaacgctgtcccactgattgtttgatctgcttttaaatgaattgaagcaaaagcatgtaataatgaaaacaatccaccaataagcccagctacaagaagcgctacaattaataaaacttgtccacttaaaatttgatttgcttgcataaaattaataaagaacacaccagcaaacccacctaagatcataatcccttccaaagcaatattaataacaccacttcgttctgaaaacatcccacctaatgcaacaaccatcaaagggatagcaaatagtaaagtttgggcaaacaagaaataaataatactcattattcatgccctccttcctcaatttttacttttttacttttacgtttatttaagaacatcttaatcaacaaagtaaatgaactaaagtaaataattgctgccacaataatatcaataacttcaattgcaatatttaatgattgcatataatttccaccaacattaatatatccaataaataatgccgcaaaaataactccaattggattattaaatcctaacaaagcaactggaatcccattaaatccttcattaggtaaaacctcagaaattggtaaagtctttccagttcctgacatataagcaatagctccacctacaccagcaaagaatccagcaattgccattgataaaataatacattttttctcattcatccctgcatatttagcagcatcagaattataaccacaagcttttaattcataaccaaaagttgtcttgttcataataatataagccaaaacacataatccaattgcaataacaatcccaaaattaatatgtgattctgggaaaagaacatctaatccaaaagttggaatcgctttagatgcaggtacagcataagattcagcaccagttggattataaattgttgctttaattccttcaatcaccaataacataccaatatagttacacataatacatgaaataaccacattaacatttttaaatgcttttaaaacacctggaataacagcccataaagccccagctaatcctgctgctaaaatacagaaaatccataaaatagaatcaggaataaaagtacacttcaaagcaacaaaaacagcagtaaaagctccaacaatatattgtccgggtgtcccaatgttaaactcaccacatttaaaagcaaaagctacagaaagtcctgtcatcatgataggaacagctaaatagaaaacttgtcctaaacttttagcacctttataaaaaccgccagttaataaaagtttaaaaccagataatgcatcaccaggattggcaatcaaaataataatcaatccaaaaattagccccattccaatagcaaccaaagaagaaatgacagatttacttccctctttcttaaataaagacacaactttattcttaaaactattcatatccctcacctctctttgaaccagccatataaagacctaattccttcacatcgattgtttttggatcaagattggcaacaatttcaccttcatacattactaaaattctatcacttacattcataacctcatctaattctaatgaaacaagtaggactgccttattttcatcacgatgagcaacaagttgtgaatgtataaattcaattgctccaacatccaatccacgtgttggttgaacagcaatcaataaatcagaatcactatccacttctctggcaataattgccttttgttgatttcctcctgacatccctctagcaatagattttctaccttcaccagaacgcacatcaaacttatcaatcaaataatcagcatatttattcatttcatcaaaacgaataaatccattcttttcaaaacgaggtttataataactctttaaaattaaattttctgctaaagaataatccaaaaccaaaccatgtttatgacgatcttcaggaatatgagccattccatgatcactacgatgacgaattgacatctttgtaatatcttcattatttaaataaacacgtccactcgtagttggaaccattcctgttaaagcataaacaagttcactttgtccattcccatcaattcccgcaatacaaacaatttcacctcttttgacttcaaaagaaatgtttttcaaaacttctttatgtccactcttaggatgataagttaaattctctacttttaaaacagtttcaccaacatgagcttcacctttttcaacattaaaattaacttttcttccaaccatcttttctgataattcttcttttgaaacacttgcaacatcaactgtatcaatgtattttcctttacgcaaaattgtacaacggtcagcaacagctttaatttcattcaacttatgcgtaatgaaaataattgattttccttctttaactaaacctttcataatatgcataagttcatcaatttcttgtggagttaaaaccgcagttggttcatcaaaaattaaaatgtcattatctctaaataacatttttaaaatttcaacacgttgttgcataccaactgtaatgtcttcaatataagcatcaggatcaacatttaaatgatacttttctgataacgcgacaactttcttacgcgcatcagcagtcttaataaagcccatagatgtatcttctacacccaaaataatattttccaaaactgtaaagttatgaaccaatttaaagtgttggtgcaccataccaatcgcatatttattcgcatcattaggatcattgatttgaacttctttgccattgattttaatcattccttcatcaggttgatataacccgaaaagaatactcatcagtgtcgatttaccagcaccattttcacctaataatgcatggatttcaccttgtctcacctgtagagtaatctggtcattcgccttaataccaggaaattcttttgtgatattaagcatttcaattgcatattccaatatactcacctctgcttcattatactataaatttctcacttggaaaataattttattcatctgatttgacatttatttaacaaattgatatgaatttgacaagatttatcatatttcatcttattaagtataaacaaaatccaacattccattcaaaaatagaaaaagtaggcatttgcctacttcatcttatttttcatatgtaactgttacattacttaaagcatcctttaatacttttgtatttggatcaccattagcttttttatcaacatcagcgttagaaataatctttacactaccatctttaacagtcttgaatactttatcataatcttctttagtgaattttttaaatcttgagaaatcaggagataatccaacataatcaccagcagcgtctagtgtgtagattccacctttgaagctcttatcaaatgcagctttaatttgatcataaactgttttgttaacacctttcatagcagaagttaaaacagtcttgctagcatctttttgatcactatcgacaccgattgataatttcttagtttcatcagcagcagcgaatactgagttacagatttgtccaccacaagagaaaataacttcagttccagaattataccatccagcagatttagatttaatatctggagattcattaaatgtacctgtataagcatattttacttcaacttttacatttaattctttagcagcatcattagctccttgtaaataaccatatccatagttaataactgcaggtaaagcaataccacccatgaatcctaattttgtataaccttctttaacagctgcataaccagctaaataaccaggttgagtttctttgtataatgcacaataaacattttctgttggttcaacagcattgtcaccttttgcaggtgttgcatcaatcaagataaatttaacatctttgtatttttcttggatatttgcaattgtttcagaaaatttaaatccaggacatacaataactttggcaccattgtcaactgcattttcaatttgagcagtatatccagcagtatcaaaagttgcaggtttataatacttataacccaaatccttttctttaccatacttttctacagcttcccatgcagattggttaaatgatttgtcactgattgtaccttgatcagttacaagtgcgataactggtgttttatcttttgcttcttctttttctccacctttaccgccaccgcatccaactaacattaaagataatgctaaaagcgacgcaaatacttttttcatattcagttttcctcctttgaaattctacacatattctaccattatttttacaaaatgaaaagagtgattgcatataactcgacatttttttgaattatctgaatcactctcattctataaatcttcttcatgatattgacgaataaaaacttcacgaggtttgctgcccaattgtggaccaataaccccttcttcttctaatcgatcaataatacgcgcagctttattataaccaattctaaattttctttgtaataatgaagtactggctttttgcgcttgaataacaaattcgcgacacatttcatattcttcatcttcatcatcataactatcaccattcgaagatgaaccagaggaaatcgctttagcattgacataacgatcttcataaattgcttcttgttgtgaagaaacataatgcacaattgatgcaacttcttcatctgaaacaaaacatccttggacacgtactggtgaagaagcccccattggagaaaataacatatcccctttcccaagcaacttttcagctcctgaagtatctaaaatagtacgggaatcaatacttgaagaaactgcaaaagcaatacgtgaaggaatattggccttaataacacctgtaataatatcagttgaaggacgttgggttgcaacaattaagtgaatccctgctgcacgtgccatttgtgaaatacgcataatacaatcttcaacttctttacttgcgaccatcattaaatccgcaacttcatctaaaataataacatgatatgataaaatctctttttgttctgattcatccttatcaacattatattccttagcaaactcattataacttttaatatttcttgcatttacactcgcaaagacatcataacgtctttccatctcaacaacaacttctcttaaaaccgcagcggcttttttagggtcagtaacaaccggtgctaataaatgtgggataccattataaattgacaactcaactttcttagggtctaccaaaatcaatttcacttcatccggctttgctcgcattaaaattgatgaaataatggtattgacacaaacagattttcctgaacctgttgctccagcaattaatagatggggcattttatctaattcagcataaataggttgacccgaaacatcttttcctaaagcaacaactaatttattgcttgctaactttttattgttagataaagtcttaaatacatctttaaaagcaaccattgaagatgattggttaggtacttcaataccaacataaggttttcctggaataggtgcttcaatacgaatatcagctgttgcaagcgccaatttaatatcatcttgtaattgtaaaattttattaactcttgttcccgtttctaattttaattcatatttggtaattgttggaccaataaaagcattttcaatagtagcattgacgccaaattgttttaaaacagttgttaatcttgaggcatttttatttgctgtgcttctttctttagctgcattatttgttgatttcgttgataataaagaaagtggtggcaattgataagacgatgatgtatgaataattggtttttgaactttttcttcaacctcacttgtttcttctttaactggactcatttctttaatatctagtttcattttttgatcatcaaattcaaaagcacttgttatttcaggatcaagcggtacatcttttggttcatcttcaaaaacttcatcaggaaacaacggaatttcttcatccttagaaagaaaatcaaagaaatgagatttcttttttaaaataattgtttgaactggtggctcctcagcagcctctttaactttcttaacagatttcttctttttcttttgagccttctgatgttcaatataaagcttactaaaaagcaatgcacttccaatcaataaaacaatgatagataaaatcaatgtccctaaattatcaaataaactacttaatataccataaaagaaaaccccaatcattccacctttattaaaagcatgactttggatatatgtattcataactcccattcctttgatatttggatcagaaggaatagaagcaatcgttaaaacacttaaaaatattaaataaagaccaagtgcttcaggtccagtaaaatgaggaagttttgccttatataatacataaagacaaacaatcatcatcgccaaataaacaactccatataaattaccaactaaaaaagcaaaacattgatgaagcatagctcctataaagcctaatttcaatgcggcaataatcacaacaaaaataaccaacaaaacaataattctaagtcttaacgtttcttcaataacttgattcttagactttttagaacgttttgatttagccatgactttcaccttctttcgctttcctcattataccaaaatattcctctcttgaaaagaaaaagcaagattttctcttgcttagatttctacaacaacacctataaaaactggttttttccctgtttctttcacaatatacttcattgactgatctttcatcattgatctaatttcagcaatttccatatctggatcttctttcaatttaccaacaacattttcacagatttcaatcacatgcttaataacatattcagaatctttcaaataaacaaatcctcttgtttgacaatctgtctgggcaataatttcctttgtttctcgagaaattgtcaatccaacaataacaactccatcattagctaattgaatacgatcatcaataaccttttcgccaacatcaccaattccaataccatcaatcatcacatcttctatttcataaagatctctagccttcactagttcacctttttcaaaagtaatacgttctccattgtccaaaataataatattttcacttggaatacccatttcttcagcaatatgctgattaaagataaaatgttggtattctcctttcattggaatataatactttggattaaagatttgaataataacttttatatcttcttcagatgcatgcattgaaaataaatctttattttttaataaataaacatgggcatctgttttatacaaaccattatgtgccttattagcaatcttttcagttccaggcaaaactggtgaagccacaatgaaagtatcaccttttcttaattttaataaatcatcgccaccatcaataatatcacaaatatcatgatagatacgacgtggacttccactcaataaaataacatagttgctatcatattgtggtttcccaatattttccttttgacctaataaactatcagggacatcaataatcggttcttttgattttttcccaatacgcaacaaactatttgtattatcatatttatcacgcccatagaaaacaatttgtcgtttatattttttagttaattcgataatttcctttgttctaaaaacattttgagcataactagaaataataattctttcattactatcttcaaaaatatgatcaattcgatttgttaatttatgattaggtgatgtataaccttcatgttttgcacttgatgattcaaccaataaagccaaaacaccttttttaccaatctccatcatcttttgaatatcgcatctaaatccatcaggtgctccaaaatcaataatgaactctccactataaacaagataaccttgatcagtccataaagcaacccctacactccctggaatagaatgtgtcactgggaaaaactcaactggaactcctgctatatcaagtgaagcattacgtttcacacgtcttaaatcataagcaatctttactcgattatgacgttggaaacgttccatcatttgttcaattaaatccgctgttaaatttggtgcatagataggcacattgacactttgtaataaataaggcaatgctgccattgcatcatcatgaccatgtgtaataataatcgccacaatttgatctagtctttcttctaagtatgtaaagctaggaataatcacatcaacacctagcttatctgaatcaggaaaacggaaacctgagtctattataaatattttttcgttgatttcaaagcagtacatgcttttacccatttctgcttgtccacccataggtataaacctaatgatatcgtttttcatctttccaccctttctcttttgttacatatattatacatgtgtttttcttttgtgtatagctttttcaaaagtatgataatcatatcataaacttattcatcgttcaaattgttttcttatatttttcaattaatggcgcaagtttaacctcagattcttcactaatcggggttaatggacaccttaatatattttgaatatacccaagttgacttaagatatacttgataggcgcaggagaaggctcaataaaaacatactcactaattaattttaaataacgatcatcaaaaatattttcatttttacaaatttcttcaattaaaggataatcaagatgactggttactgaaataattccatcagcatgttgttttaatccttctaacaataaatgatcatcaccaatataaactttaaattgtggcaaattttccttaagaatatgaatttcatccaatggtccacattgcttcataccaataatatttttatgtttattagctaaacgaataaccgttgaaacatctattgcgactccacagcgactaggaatattataaatcataatatttttatcagttgaagaagcaatcaaatcaaaatgtttaaaaataccactttgacttggtttaatataataaggaacaatgactaaaaaagcataaatacgtggattatctttatacatttgaatatgtctaataacttgagaagtactattagaacaaattcccacaatcacccgaatagttggatatttctccaaaatattttctacaagcatccgtctttcatccaattttaatgttgaagtttcaccagttgttccacaaagcaaaaatgatttattcccttcttcaatcaaatgatccatcactctataaagacctggataatcgattgattgatcttgattaaatggtgttaataaagctgtaaatatctctttcattttatacctccttgtatcctaatatgaaaggttgacattgttgatgtttcaatgccgcttctaatgttggaataactttttgatgacaagcaatcatactgtttggttttttaatatactcatcttgatacattggaacaaagtaaaaattcttcttccccattaactcaatcagattcttgccactgtgggtcaacacatcattagagaacactcctaaaacaattggtacctgatttcttaaagacgacttaacaagcattgtcactgcattatcattaattccgtaattgagtttagccagtgttgctccatcacaaggataaaccaatacgatatctaattttttaataggcccataaatttcagattcttgaattgttgtatgaatctttttaggaacaatcgcttgtattttttcaacgagttcatcacggctatgaaacctcgtatccattgtattcacatgctcagttaaaaagacctcaatatcataaagtttgacaagtttttctaaaaccatcaacatatcatccatactacaaaatgaccctgttatacaaaatcctaatttaagcattttcaagcttcctttctatttcatccgcaatcatttttccagcatatccataagcatatttacaaggaatagatggcaatatttgacaatttatcccttttgataaagcataatgatgatcaattccataaggatatgaagcaatatcaacaatcataagattctttttaatatgatctaattgttctttttcaataacaacatgtggtatcgtattgattaaaatatcacactgtgataaatcaacttgatcaatagctatatattgagcattcttcttttcaatctctttttgatattttctttttctaactgcaacttttacatttgcttttaaacctatcagatcatcaataattggtttggcacaatgtccataacctaaaacaatcacttgactatcatacaaaggcattcgccgatgtgaaatcaaataactcattaatccctcagcagttaaaatactatttttttcaacaaagttttcttgatctaacaaggcaatatattgaaaatgatactctttagataattcaataagatattcattatgaattaatgtaaatactaaacaattctcttttaaatgcttgataatctcctcatctacaacaatcgtttcatgttctaatatcaaacgattctttcgatccattccctttgctcccaaataaatcacatcagcatatttcatatctttcaaacgatcacttacataatatccccttctcatcaactcctccatcagctctaatgaacgcatatcatcatgattaataaacactaacaattttcccacctcaatctaaaatatgtcaaaatacctaaagtgtgaaggaaagaaaggtcttatgacccttcttgaataattgaatcaaatgctagtaataaagttgaaagttgtggaacaacatgataaattccatcattaacaatttcctgacgatcttttggaagtccttcttcaaattccattaaatatataatttttaaatagtatctaaaatcatcatcagaaatatatccagcataaactgacaaataaaatttcacctccctttgtgacaactgttccatatcaaaatgaacttgtacatctcgacatgtgttttctaaattacctctttcaaaactcaaatcatctaaaatcaacttcataaaaaatacctcctcacttctatataccggatttttttcgttttttctttttatttttgtaaaaaagtatataatttttttgaggtgagaaaatgctttatttattgatttgttcttttacaatttttattgccagccgtgcagatttaatgtatgaaaatattactggtgtatcaaccctgccacaatatcatttacttgtcattatatatactttcttttgtgcaatgatatttggttataaaacaaaaaaggttttccaatgtttaacacattatcaacctttttgtttaataactatttatttatcgagtttacttatggtaattggttcattatttatctacacaacaaatggacaagatctttcatcaaaaattcatgtctattgttcaatgctaccaagtttatttttcattattttattatttatttataatcgttatttactttatcaatttcctgaaatttaccaacgtattcattggtattttgaatcaggggtttcttttttaggtattttgttagtggtttttacaagagttaacggatatattgaaattctttttgcgattttaatgagtagttatctgtttatcattgaaaaacaatttcaaaaaatctcggtacaaaaatcatcaagccaataatagctgcaaaaatagcactcactaaaacagcgcctgctgctgtatctttggcaattttagccaaaggatgataagtaggactacataaatccacaactgcttcaatcgctgtattcactagttcaagagcaataacaagggcaaataacaacaaacaaatcatccattggataatgctaatctttaataaaaaaccacaaacaatgacacatcccatcacaaacaaatgaatttttatatttctttctttttgaatacatgtttttattccatttattgcataccctaaacttttataaaatggatctttcatcacaatcaactcccctattcattataacataaaaggacattgacaagaaaatagaaatgtccttttcaatataaatgcacaaaaaaactactccatagagtagttatcttttagatggcgtccacggagggattcgaacccccgaccgcacgcttagaaggcgtgtgctctatccagctgagctacgtagacatctcattcccgactgctcatatataatatcataatcacaaatatgatgcaagacttttcgttaatttttttaaaaaaattttaaaggatagaaattactctatccttctatgccttataaagtaagatgactattaaaccacttataagacaaatgtgtttttcctttataagaatataaaggacaatgttttgaaaaatgaggagaaggaaattttgtcattggtaatatttgttgaacttcataactttgattactttgttcaaccattggtgtaacatttaaaaaagatggttcagtaacaaaacctattgcaattctttccatattgaggcctccaattctttttttatccctcatctttcgctatctctattatagcatatttttaaaaaaattgatatttgaagcatttttcattttctcgctgtataataaaataaaggagttggtagaatgaaagcttatcatatgagtattgatgatttatcaaaacaattacaaacaaatttagaaacaggtttaaatgcttctcaagttgaaaaaagacaaaaacaagatggtgaaaataaacttgaagaagcaaaaaagaaaacaaatttagaaaagtttatcgatcaatttaaagatgcaatgattattattcttttaattgctgctgcaatttcttttggattagcctttcaagaaaaagaaagttctgctttttttgagcctcttttgattttatttattgttattgttaatgcaatcatgggcgtctttcaagaaaataaagctgaaaaatcattagccgctttaatgtcgctatcgtcacctaaagcaagagtcattcgtgatggtcaagagagtctcattgatgcaaaagaacttgttgttggagacttaattcaactagaagctggtgattttattcctgctgatgccagaataatttcttcatcaagtttaaaatcagaggagtcagcattaactggtgaatctgtacctgttgataaaagccctgaaatcgttgaagaaaatgctacgattggtgatcgtaaaaatatgctttattctggatgtagcatcacttatggaactgccaaagcaattgtaacagatattggtatgcaaacagaaatgggtaaaattgcacacttattaaataatgaagaagatgataaaacaccccttcaagaaaaattggctgaactgggtagaaaacttggtatgatggcaattgctatttgtattgttatttttgcgattggtctatggtatggaatgcctataattgaaatctttatgacttctgtgtctttagctgtttcagccattcctgaaggattacctgttattgttacgattgtcttatcgattggggtaggtaaaatggcccaaagaaacgctattgttaaaaaattacctgcggttgaaactttaggaagtaccagtatcatttgttcagataagacaggaacattaacccaaaataaaatgacacttattaaggcctatattcctaagcttggtttagaagatataagcaatcacaatagtcctttggttttaaagcttttaaaatatgggactctatgttctaatggaagtgtcactatcgataatgaaaaagaagaacatattggagatccaacggaaaccagcattattgcggcaacaatcaaaaatcatatttcattagatgaacttcatcaacaatatcctcgtcttttcgaattaccatttgattccaatagaaaactgatgagcgttattgttaaagaagatgaccattatttggttattacaaaaggcgcatgtgatgaacttattaaaagatgtatagaatcacaagatgaaatcttatcaataaccgaacaactcagtcaacaagcattaagagttcttgctgttgcttataaaaggttagatacattccctgataatccaactattgaatcattagaatgtgatttaactttcttaggacttgtcgggatgattgatcctcctcgtcaagaagcaaaagaagctgttgctacatgtttaaaagctggtatcaaacccattatgattactggtgatcatattacaacagcgagtgccattgctaaagaattgggcattatgcaagaaaatgatgaagcgattattggaagtgaattagctactttaagtgatgaacaatttcaacaacgcattcaaaatatttcagtttatgcacgtgtatctcctgaagataaaattcgtgttgttaaagcctggcaaaaacaaaacgccattgtttccatgactggggatggtgttaatgacgctcctgctttaaaagccagtgatattggttgtgcaatgggaattacaggtactgacgtagccaaaggtgctgctgatttaactttaatggatgataattttgccacaatcgttgctgctgtgaaacaaggacgtggaatttatcagaacattagaaaaactgttggttatttattaggaacaaacattggtgaagttttgctagtctttgttgctatgcttgtctttaaacaagcacctctgctttctatgcaattactctgggtcaatcttgtcacagatggtatgccagcaattgcacttggtatggaagctattgaaaatgatgtcatggatgaatcacctcgacctaaagatgaaagtatattcgctcatcatttaggcgaaagaattattttacaagggttcttatttggtggtctttcattatttgccttctggtttgcccaaaccactctccattcattaacggctggaagaacattgtgttttatggtactatcattatcacaagtctttcaatcatataatatgcgttctcatttgtctttatttaaaataggcgtttttacgaatcattatcttaacaaagcagctcttgtttcctttgcattaatggctatcgtattattcattccaccacttgctacaatctttggtttaacattcctgcctttttcttattatctcattggattaggtttaagtatgtcacctattcttatcatcgagatttttaaatttttccatatactgcattaaaaaaatcgagcatttactcgatttttttaaattcacaactaattttttcaccatcaattgtaaccactgcataacttctttcgctacccccacgaggcaaagaagtcgaaccaggattaatatagtaataattaccatcttgtaaaaacattggcgtatgtgtatgaccacataaaagcacacgacactgatttcttgtcaaaagatcattcattgctaattcacgattaaaataaccaaaatattgtccatgggttatcaaaataggtattccttccacttcaaaacgtgcttccattggtagatccaatgaccagtcattgtttcccttaacacatatataccccgttaacatttctttataagcagcttcactatccccacagtgtacataataatctgcctggggttctttttctttcacatattcaagcatatcatgttgtccatgattatctgacatcactacaatttttttcatttctatcaccagtcgatattatatcataaagactgattttaagctattatatcttgatataattatattcaatttgtgaagattgttttgttcttacatcttctccattgattttaatttctacatctttaacattttttaatgaagataaagataaaacaattaaatcttctaaactttgatcaattcgttcattatctaataaaatattagaatccaaatcaattgttaaaatcccatctttcatttgagcatccaataaatgaatcttactttgaacataacttaaaatcgtttgaacttgactttttaatgattcattttcatcaattctaaatgttgtaggaacataatacgaaaattgttcaatggttttttgattataaaccataactggtattgtttcatgaagcaatgaagatgtttcttcaaaattattcaatcctaaatcatgatgaagcgaagataatggtatagtactattaggaagatacgaaacatcttttccattaatctgtaactttaattcatcaacatcttcataatcagtcattgtatatgtcaatgtttcaataatatccattgcatccttattcgcataaagttgatcattaaaattaattgttaaaaccttatcttttaaatcaactgattcaacttgtaaatcatgactcaatactggatacaatccataattcaaaaactcatcagatttcatcaattcaatccgatttctaacatcctgttccaattcaacttcactatgaaaattcactgtaatcggaatcaaatcattatcactatccttaaaaacaactgtctttaaataaacatcctgattttcttcaatactttcatcttttaaataaatataagacacaaaagttaaacatatgattaatatggaaataacacctattcttcttttcatacttccacctcaacataacatatgtttctatttaaaaattagaacaagaaaaagacatagctacaaaactatgccttatttttcaaatgatagatgttgaacttgtaacccctgataatcaaaaaatccttctgaagaataacaaaattcttttggttccccagttgtatagatttgaacaattccttgactttcctttaaattcaataaatcatgaacacgtaaatatgagctgacctcatgactaattgaggcactactagaaatatagactttatcagaaaatacttctttcacttgattaagaataattggataatgagtacaccctaagattaaagaatccactttatcttgataagatgataaataatttgaaatcacatcagctatcccttttttatattcaccagactcaataaggggaactagctgtggtgtggcaagttcataaacttgaattgaagaatcataatgatgaattgtttcctgatatttatgtgattgaattgttgcctgagttgcaataactaaaacacttctttgatgttgacttaaaaagtcatggacagttgaatggattacacccacaataggaacttgtggatacaatgcctgtaattcatctaagacattggcacttgttgtattacatgccaaaacaatcatttttacattttttgaaataaagaaatcacagatttcttttgtatatgacaacaattgttcttttgttttatcaccataaggacaatgtaaattatcaccaatataaatcatatcttcatgtggtaattcgtttttaagatgggtaagaacagttaatccccctacccctgaatcaaatataccaattggtttcaccatataaaatctcctaacttgtttgtgattgatattcttctaatgtcatctgactatcatgtaaagatttggccaatgattttcctacataacgataaatatgagcatcataagtatgatttgtaatggatgcttttctttgtggatatcgtaaaataaaaccatattcatatgcatgttcttctaaccattgtgacatttctgtttgactaaaactgttataagttgtttgtgattgggttacagtaatagtcaatcccaactgagattcatcataacctactttcttagctgataaatcttgatgagaaacatatgcttcttttaataaaaagccattaaacttttgacttaaatcttgatacatctttaataaagcatgatatgcatcactttgtaaatacattgcatatctcattcttggaatatcttggaccaacaataaaccttttggttcataattaccaatataatgcatattatcaactaatgttgataattcataaggattataaacaatatgaacattctctggtaaagtcgtcgttaataattgatgtaaagatttttgattataagccgttgttaacatattcattgtatcatttaaatcatcaattgtttgaatccccatttgattcaaacgtaagacatattcagctccgtcttggatataagaataatctttttgcgcatataatggtgctaatgttgaatatatatctatgtaatcaaaattaaaattttcttcatttaaaaaagccaattctaaatcacggtctatcaaaagcttagctttttgaaaagattgattattaaataaataacctaaacgcgttgctaaactatttccagtttctaatatattttcgatttgacgataacgattggtcgcttttaaagcattgtaatattgataattttctaaatgaaaatcattatactcaatataatcaataaataaatcaattgaaatctgattatcaatcaaatagctttgttccttttcatccaaatacttttcaattaaaacacgattatcattattaattccattaacacgataaaacttatcaaacttcaaattcacaatataaaaagagcaaccaaataatatgataatcaccaaaaacaaataccacgtttttaatttcatatcatcaccctttcttgaccattataatacatattcatctatttggaaagaaaagaaattgatttacaaatcaatttccttcatcttaatcaattccaaaactgcttgtatacgagattccacaccaagcttttgaatcacattagaaatatgattacgaacagtcttttcactaatacacaattcactagcaatctgttttgttgatttattcaacgtcaacaaactaaatatctctttttctcttttggtcaataaggaatgcataatcaccctccttaacataacatatgagaaaaataagaatgcgtgctactcaaggtgtaaagattcaaaaagttcttcagcaaccttttctggcaataattcttttaattcatctaaagatgcttctttcattttctttacacttttaaaatgattaagtaattgtttttttcgttttggtccaattccttcaacattatctaacaatgaagcaaagagtgactttgaacgaacgtttttatgaaaactaatggcatagcgatgaacttcatcttgcatacgtgtcaacaagaaaaagagttcactcttaggatggatagggatggttttcccttcactatccaataacatggccgtagaatgcttatcatccttagccaaaccacaaatttgaataggcaaattaagtgattcaataacttccttagcaacatgaatttgtcctaaaccaccatcaacaatgaccatatcaggaggtgttaatccttccattaaaacacgataataacgtcgataaatgacttctcgcatgctgccataatcatcaggaccttccacagtttttattttatacttacgataatctttcttagaaggtacaccatctttaaagcataccattcccgctactgcataagctccttgaatattagagttgtcaaataattcaatgacatggggtgtaggaatatttaataactctcctaattgcttcatagccccaattgtggcagcttcatttttttgcatcaactggaatttcttttccaatgattctttcgcattttcaattgccatttgaaccaatgaatgtttatttcctttttgtggttttaaaatcttacaatctaaaatttcttttaataattcatcatccacatcttgtggtaaaagaatttcttttggtaacgtattactttgataaaaactcacaataaactgttgtaaatcatcttgtacattctcactaattggaaccaaattcaaatcacgcgataacaattttccattacgcatgaaaaacaattgaatactcaaatagccatgatcaacataataacctaaaatatcacgatcaacctgatcattaaactgaacatgttgctttgctgtcacatagcgaatatgcgaaatcaaatcacgatattccttagcttgttcaaagtttaattcctcacttgctttattcattttttcagttaattcattcaccttatctttaatatcaccatttaataatttaacaatagactttttaatatctgtataaacatcttcatcaacttcctgaatacatggtgctaaacattgatttaaagaataatataaacatggctttttaggaatgtgattacattttctaagtggataaagacgatctaaaagcttatacgtttctctagctgctgttgcatcaggaaatggcccaaaatgcttggcttttttttctttggcattacggacaatctttaaacgtggatgtctttcattagtcatctgaatataaggataatatgtattatccataaacatgatgttatatttaggtgcataatctttaattaaattaatttctaagagtaaagcttctttttcactatcagtaacaatatattcaaaatcaacaatttcactcactaattttgttgttttataattatggactcctacaaaataagaatgaacacgattttttaatttctttgctttaccaacataaataattgtaccttctttgtctttcattaaataacatcctggcgaagatggcaacaaagaaagtttgtttttaatcaaatcattcattattcaaaataaaccaacgttgcacctaatccgccttcattaggtccaccatcacgataagaaacaacatgtttgtttttttccaacatctttcttactccttttcgcaatacccctgttcccataccatgaacaatacggacatgaggatatcctaaaaccaatgcatcatctaagaatttatccgttaaggccattgcttcttcataacgtttccctataatattaatctcataagttcccgttttcgcaacagttgtctttttcacactagcctttttcactttcttaactttcgtttttggatgcataaagacaacttcatcttcatgtaattttacatttaaaccagataaagaaaccataatcatatgattttttaaaatttcaacaatatccccttcacgattcatcttacttaccaagacatgatcacccacttgtaaatcatgatcttgtttttgaacagctgccttttcaataaacttcatttcatctaaatcatgttttgcttgaatgatttcgtgttgtttaagtgaagaagcatttaatgtttcaacaatcatatcaatattttctttggcttcttctaataattgatttgcttcatctttggctttttttagccattgatctttttgcatttctaattgatgaagctgatgttgatattgtttttctaacttttgattcgttaacatcaattgttttaattcagcttcttttaaatccaattgttcttgtttcttttctaaagcttccattaatttttcatgttcactcatcgcttcggcttttaaaatcttagccttatcaactaacgcatcatccaatcctaacaattgagcaatttcaatcgcataagattgaccaacactatctaatttcaattgatatgttggacgcattgcttctaaatcaaatgaaacagatgccattaagatttcaggatgttctttggcaaaagttttcaactttccataatgggtagaagccaaaacaaaaggtcccatttcaataaaacgtgacaaaatagcctcagctaaactcgctccctcttgtgggtcagttcctgaaccaatttcatctaaaataactaaactatgacgagttgctgattttaaaatatcaataattttcatcatatgacttgaaaaagtagataaagattgttcaattgattgttcatcacctaaatcaacataaatctgatcaaacaaaggaattgttgcttctagacatggtatagccatcccacataatgccataaaagaaagcaaacctgtcatctttaaagttacagtttttccacctgtattacttccactaatcaataacatacgatgatcttttaaaatcactgtattagcaacaactttcttttcatcaatcaaaggatgacgtccttcttttaaaatcaattgatcttgtaaacttatttgtggacgacaacattgatgaatatacccatattgtcctttagcgaatacaaaatctaattcttctaaaatttctaagttaaaatggaaatgataataatgtccttttaccatttgtgataaagcatataaaatacgttcaatttcttcacgctcagcaacttgacataaactcaattgattattcatactaacaaccacttctggttcaatataagttgtttgtccagttgcactttgagcatgaatcaatccttgaatctgtcctttataaccagattttactggtaaaaccagacgatcattcttcgttgtgatttgatcaattgataacatatctttagattctttaaccaaggaatccattttatgacgaatttgcgattgaatttgacgcatttgttttcttaaatgacttaaagtcgaactggcttgatcactcattgtcccatctggtaaaatacagcgccctatctcttgcaataaatggggattgtctactaatccatccgctaattcttgtaaataatgagtttttaactcacttgattgaaaatagtttttaacactttgtaagcattctaaatgatgagcaacctttaacaattcatcaccttgtaaagttccatcacgatttgctttttccaataataaagaaatatcactcaaaccacctaatggtagtcgaccttgtagattaatcagtttcattgcttcttcaactttatccaatgcttcattaagatcatcgatatcatcaaaaagcaccatttcactgactctttttttccctaaactagaagcacaataagtttgtacttgtctttgaatttcattcatttctaatgtttcatatattgttttcattattcaccactcacattaatatttgataagattgattgaatctgttgttttgtataaccagattcttgaagtaagtcttctatttgttgtttttgttttgttgttaatgagatgttatgctgatttaattcattaagaatattttctgagaaaatttgatgtgcttgatttgtatcaattaatcccatatccatcgctgttaacattaattttgttaagttttctggctgcatggcatccttattgtcaaattccaataaacttcccatattcatcattgattcactcacttgtggaacaatatttaaaattcgtggagcaagtattgaatcttgaatcatagttttaccattttcgacaaagggaatgacaataaaagccaaagccagatatccaatcacgataccttcaattaaacttaataataaccctaatactttatcaacaaatgaagtcaatgcgaaagtttccattatgccttttaaaacaggtttaatggctaaccctaataattttttaataattgttaatcctatcaataaaataacaaagataatcatttgattaatcaattcaccaatcattgatgctaattgatcttgatgatcatattgatagattgttaaaattgaagataatggttttgttaaaaaataagacaaacataagacaacaatcattcctaagaagtcataaagtcttgtaacaaaaccttttatgtatccaataattgccattataaataaaaatatgacaaaaataatatcaatcatttgaaaattcaatttaaaaacctccttataaactcaaatattataacatttgaaaattgttctgtcaaaattgacaaaattatgttaaaataatatagaggtgattaacgtggaaccaattatactcaaagtagaagacagtacattggagaaaatgaaaaaatattatgatagccaaatggttccagttgatgacactaaccttatatttaaagcacatgcgattggttgcgatattgttgcgagagtggataagacgattgaatttagtggacaaaacgctgttcaggaagcaaaacactggtcaaagaaaattgctaaggaattagcaaaaataacatctaccattgatgatgttttttcgtatcatcatattggttgtgctgaaacgggttcttctgattatttgggaccaatttgtatcgtcgcttgttatgtttctgaagatgacgttcgtttattaaaagaattgaaaataaatgacatttctaccctctctaatcaagatattgtgaattgcgcaaaattaattaaggataggttgatttatagtttattgattttggacaattcgcattataacaaaatggttcaagaaggctttaatcaagcaaacatcaaagcaaagctctacaaccaagcaactgttaacgtcatgcaaaaagtaaagcaaaatgtaaaggtaaaggtgatcaaccaatttgtttctccaaaaacatatttcaactacttaaaaaacgaagtgattgttgtcaaagatttaatgtttgaaacaaacgctgaggagaaatatatggctgtccttgctgctgagattttatcacgctatgcttacttgcaatattatgcaaatatgacaaagagtttaaagatgaatctttgccgaggaacaagtgcaaatgttgatgctgttgcagcaaaaattgcaatgaagtatggtgagaaaatgttaactaaagtcgcgaagttaaatttcacaaacacaaaaagagtaaaagctttaatcagcgataagtaagaatggctatgatccattctttttttataaaaaaccacctgtttaaaggatagacaatttcaaatgatctattctatcaggtggtttttattataagatatcaatttcaaaagcatccattttagtatacttgactttagctgcatccaacatacgtttggctgctttatcacttggtgtattactatatttatcatcttcgtatacaatttctttgattccactttgaataattgctttcacacattcatgacaagggaataaagaaacataaatacgacaaccatgtaaattttggatactatttaaaatagcattcaattcagcatgaacaacataaggatattttgtatcatacatatctccttcacgatttgcccaaggaaattcatcatcttcacaaccccaaggtaaaccattatacccaacaccaacaattttattttctggtgtcacaatacatgcccctacttgggtatttggatcttttgaacgataagcggaaagcttagcaacacccataaaatattgatcccaactaatgacttttgacataacgattcctcctaattcatttcatttcttaattcatctaatttagctttaaagaaatcaggcaactcactttcaaaatacatttcttcaccagtgcgaggatgaacaaatcctaaaatcttggcatgtaaatattgaccataagttgtatcatctctttttaatccatattgtggatcaccataaacaggatgaccaatatattgcatatgaacacgaatctgatgtgttcttccagtctctaaacgacattctaccagcgtcatatctttaaaacgttcaagtactttaaaattcgtaatcgcatcttttgcattcttatcagtacatgtcatcttttgacgatctttaggatctcgcccaattggtgcttcaatacgtccaaactcatgtggaattaaaccatgaactaatgctaaataacgacgtgttacagtatgttcttgtaattgttcacttaagctagcatgtgccatatcatttttagcaaccatcaataatccacttgtttctttatcaatacgatgcacaattcctggacgcataacaccattgatacctgataaatcatgacaatgatataataaagcattaaccaatgttcctttgtaaatacctgctgaaggatgaacaatcatccctgttggcttattaacaacaatgacatcctgatcttcatagacaatatctaaaggaatatcttcagctaaaatatctgttgattcaggttcaggaatatgaaccataacttcatcattcacttctaccttataacttgcttttatcgctttaccattcaccaagacatgtccatcttgaatcaacatttgaatttgtgtacgagaaaagtcagttaaggctttaactaatattttatcaattctttgccctgcttcttctacaactgtgattttgatatcttccatgctttatactcctctattccaacttctaaaataaccaagaaaatccctattgtaatagccatatctgcaacattaaaaataggaaaatcataaccaaaaataataaaatcaataaaatctctcacatatccaaaaacaacacgatcaattaaattgccaatcattccacaaaaaaccaaaaccaaaccaaaacgtgttattttttgataagtttcagattgcaagaaaaaataaacaatgccaatcgtagctatgatagaaacaataaaaaataaattcattttacctgagaaaataccccaagctccaccatcattatgagaatatgtaaaatagaaaaaattatcaataatcgaataacttcctcctaatgctaaagtatgatcaacaattaactttgtcacttgatcacccacaacaatcacaataaatgttaataaatacatgaataaattcttgtatgttaaacctaattttttcactttcatcaccttttcctattataacaactttcctacacattgcaaagaaaaaaagcacattgtgtgcttttataaaataaagagaataattgcaaaataatgcaacaatgaacctaacatcacaaagatatgaaataattcatgaaaaccaaatgcttcacttatattaggctttttaaagatatagataaaagctccaatagaataagcaattccccctgcagcaatcatcattaaacaattcattgaaattccctggaacgaatgaaaatcaaagacaattgcccaacctaaaatcaaataaatcgctgtcgcaatacttcgaggtgcatttaaccaacaaatcttaataataattcccaaaatggctacactccataaaattccaagaaaataataaacatggggaatactcatacaataaactgcaactggtgtataagtaccaacaattaaaatatatatcatggaatgatctaattttcttaaaatagtcttaatcttttgacttcccttaaaaaaatgataaatactacttgcactatataatgcaattaatgaaataccaaaaacaatcgcagcaatcattaaatttgaatctgtttgattcttaattccaatgacaatcatcaccaataatccaagcaatgataaacatgctccaataaaatgggtttcactactaatcgggtccattgcttttgcaaataatttgttcatattaccaactcctttttatgtagtatcaataactactttatatatttattatatttattttttatcaaatgtcaacgagatgttgttattttgtaaaaaatcatgtatgatatgaatgaggtgacattatgaacagtgaaacatttaatgaaatattgaaagacgtagaacaaatgagtgacttaaaatcagaagatattcctgctttagatttatatatggatcaaatcatgactttatttgatattcatttagcagataacaaaagatatgatgatgataaacttttaaccaagacaatgattaataattattccaaagaaggactgttaaaacctatcaaaggaaagaaatattctaaagatcatatattacagatgttattgatttattcacttaaaaatacaatatccattcaagaaataaaaaaagtcttacaaccctatcacgatcaaactgaaaaaatcgaacccatttataacgaatttttaaatacaaaaaaagaactttcacattatgtaacaagttcaatgcaaaagtttattgaagaaaaaaatctagatttaaataatccagatcaattaacaatgttattgttatttatttgtgctttaagtaatcaatataaaatgcttgctgaaaaaatacttgatacattttatccagatgaaaaagaatagtcataaaaactattctttttcttttaagataaccaaaatatcatattgtttttcaatttctttttttatatttttcatcatttttgtagtactattataatattgttttcttacaacatattctcctaaaaaatccatgatttcttcatcttttaaaggaaattgatattgttgataatattgcatatcttcaatctgttctttttttaaagtatcaaaaccaatcaatggatttaacattttacaaccatatgcaacatattcaatcatgattgttttcacatcaaaatcaagctgtttgattatttgatgaagataatttaatatctcattttgatagacagctttggcttcttgatagctccatggggtttgattctttaaataaattaaatgacaaaaataaatatcattatcaatattgacttcaaaacattctgtagaattcatatcttcatttagaatattagcataagttatattcattgatgaatgtttaattgtttttctttttgttgtttgataattatttaaatcaatccatgattttgtattataacaataaaggtaattgggttgtttttgacggcatagacaaaaacagcctaaaacattctttccatctttaatcaatatccattgatcaaatttattagtaatgaaagccagattatcatgtatccattgataaatttcaatatgtattccacccaagacaaagttaaaaataaacagtggtcgatttttttcatccttacgataaatttcataaatatctatgttttttaagttatattcttcaatttcctgactccatttttgaataaagtcactagatagataggattttatataccaatcaccaagacaataagtgatttcattcattgtaacataataattaagaatattaagttttccctgttcatcacgaatgccactatacaagatttgatttttatcattaaacccatattccgtatgttctttttgttttgaaagctttccccttttaacattagagatatatggttccatctcgcttggattagccggcgataaaaaatttcctgatttcatatatcttacataagctggcgaaagatattcatctaaatgggtaatgatatactcaaccaacatccagattgtttcttttttccaaatttcaaccagtttttcttcctcttgactttgttgatacattttttcaatcttttttgttatatcttgtagatccataataagtcccatccttccaattacataaaaaagacaattgcaataaaatgtaaaatactagcgacattgatgaatagatgccaaacaaaatgaaaatattttttatgttttgaatagaaaaagacacctgctgaatacatgactcctccagcaacaatcaaagcaagaaataataaagaagcatgatgccacaaagcgggaatgaaaaagactgcagtccatcccatgactaaataaatcgttgttgataagataggatatgatttttctgaaatggacttgagaagaattccagcaatcacagctccccattccaaaaccaaaatcaagatacctaaccagcctttcacaacgcataaggcaataggtgtataacttcccgcgatggctaagtaaatacaaatatgatcaagttttctaaagacatatttttgttgggtttcataagccatactatgataaattgttgaaattaaaaacattaaaaataaacaaatcacaaaaatagaaacaccaattgctcgcgttacaccgccaattatataagaataaacagcactaaaaggtaataaacataaacatgctaaggccatgactccgtgactaattgcattcgaaacttcttcaccaaatgttaaatgtaacatatcacgcattgttttttcttccattttctattccccctactctattcaagaattcctaattgttttaataagaactgaccatttgtagacttagatggtccttttttaatctgataatcaaaatagatttgtccatcttgataatattcatcaaaatgataattcatttgttggatacgacttaattctaaatcatgggtagttaaaaaagtataactatatggtaaagataatttttcaattgttgcttttgctccagcaatacgatccaatgaatttgttcctttaaatatttcatcaattaaacaaagcattggttcttttttcttggcatactgaatcatatctttaattcgtaacagttctccataaaaagtagaaacgccttcttctacattatctttaacccgcattgacgtcattatatgcagacatgaacattgtaatgactcaccaaacacataaccccctgcataagccaaaattaaattcagaccaattgttcgcataaaagttgtttttccagacatattagatcctgtaataatgcacaatggtttttccattgaaaaatcattaccaacaacttgtttttgatcaatcaatggatgacataattgttgaaaagaaagtgttttttcttcagtgatttgtggtaaagttactttaaaatcatcaatttttaaaacacttaaactcattaatgcttcaatttctgctaaaccatcaaaccaacaggcaaccaattgcccatattcattcaaccatttcgcatattgatttcttagataaaaatcaaacaaccctaaaccattaagaaaaagaaaagcaaaaatattatgacgataaataacccgttgagcaagtttagataattctaaaataccttctactgctttcccttcaatacacattttattttttaaataacgaagatattcacaatgatattcacaattgtgaatatgtgcataacattgtgcataactttctaaaccttgagataaatcttctattggagcaaataattcttgatgttttttaagatttaaaataacaaagcctaattgaaaaacaactccaacttcaaataaaacttgagaataaggtgcaccaatttgaaaacaaagacctaataaacccaaaattgttaaaaaagaaacaataaagatagctggtgttatagttgatactttttgttgatgcacaagagcaatccattgatcgattgtttttgttttctttgttggaatcaaataacctaaagtttctaattgaaaaacaaaatcttcattttcagcaagttctttaactgctgcttgtctttgtaatatctcatctctttgactatctttgataagtaattcagccaaacgtttttgacctttttgactaaaagcaatatttatcatttgaaacaaagaattctttgaaaaaacatctaaatctaaagacttataatccttttcatccaaatactcatctccagtatgaagaaattctcgccatcttcctgtgattctatcaagatgcttttgataaactttccctgttgcctttaattgttgatattcatttttaattcgattatgaataactaccaaaataacaaataaaatcaaactcataagactcatgatataaagccatgatattgtttgaaaataagcaatcaataaggataatattgcaataaacatacaaataaaacgaataattgctagttgattagattgttgatgatgatgttcacattcttgttgggtttgttgatatactttttcaaactgttcctttgtcatttgatttcttcctttctaaaacaataatttctctttttggtgggcaagtatgatcaatttcataaaatccaaggtgtttccaaaaagctaaacctttaggattattctttaaacagccaagttgaatcaaagagatatctgaaatcatttctaataaatccaaaaagatttgttgtccataatgttttctctgatcactttcattcactaaaaataaacctatccataaacagtgatcatcatgaatacaactataacgataacctttcatacaatcaacatatcctatcatacgttgattttcaaaaactttataataataatgctcatgattttcaaaccctggtggtggtaacatatcatccactacatcttgaaaggttaatgtttcatttttttcaatatgaaaaaaatattctttttgttgtaaataaaataaataaagttgttgatcagcttcttgtattcttatatattctaacattttatatctcctctatgtttctatgactatgttcttattttacacgttttttataagaaaagatagaatctttataagacttcatcttatgtaaggctattttctttatattataacaacataaacaaaaagaattttatcaatttataaacgattttctctttatttcaaatataataaacaaaagaaaaacacgattttcatcgtgtctatccaataaacataaaatatgctaacactaaaatacccaaaacaatacgataccatccaaagactttaaagtcatgttttttaatataccccattaaaaattgaataaccaatatagaaacaacaaaagccacaatcattccaataatcaataagatagcttcttgagctgtaaagaccaaaccaaattttactaactttaataaagatgctccaaacataactggaattgctaaaaagaaagtaaattcagcagcaactgttcttgaaacccctaaaagtaaagccccaacaattgttgcaccagagcgtgatgttccagggaagatagcagctattaattgaaagattccaattaagaaagctgtattgaaagtaatatctgttaaagtattgattttagaataacttcctttatttctattttcaataataataaaagcaatcccaaagacaattaaagcaatggcaactgtttgatagttataaaacaatgcttctaattgttcatcaaataaaatacctacaatagccgctggaacacaagcaactaagatcttaaaccaaagaataatcttatccatttttacataagataggatgcctgtcgttgacataggttgtttattgtttttacgtccaaaaggaaagaaatcattccaaaacaaaacaacaactgctaagatagctcctaattgaataacaacttgaaacatactataaaattcactactaacatctaattttataaattcatctaataaaatcatatgtccagtactactaattggtaaccattcagtaattccttcaactattccaaataaaataacttttaatatttcaatcatattttaacctccgattgatttttgtaatacttgtattactatataacaaattccattttatgtatagaactttttaaaaaatccttgattatctcacttctatttgttgattcttcactagttcaataaaaatatgagccaattgaggatcaaattgatatccagcttcctcatcaataatttttaaagctgtttgtacatccatttcttgcttataagaacgcttagataccatggcatcaaaagaatcagcaatacataaaatacgtgccatcaaaggaatcccctcaccttttaaacgacgtgggtatccttttccatcataacgttcatgatgtccaataacagctggaatgacataatcaagtgaaggcaaatgacgaataattcctactgccagttccacatgacctttaattgtttcatattcctgatcagttaacttaccaggcttattgataatactctcatcaataccaatttttccaatatcatgtaacaatccagcctcatagataattttaaccgcttcttcatccattccataggctttagctagttcttgagcataataagctacgttttctgaatgactaaaagtataatgatctttggcatcaatcgctgccattaaggcataaatggttgacacataagaagatgctgcccctttcacatcagttaaatgtgaaggagtttgtccttttttataaactttaatttgattttttccagcttgttttgcgtaatacaatgcttcatctgcttgttgcatcacttcttcaaagccatcttttgtacaacttccagaagcaattccacaacttacagttaaagccttcatagcattttgaccagtttgttcatttaataatagaattttcttagaaaattgttcagccacttgataagcataatgtctaccttttcctggtaatatgaccgcaaaaactttacctgtataacgagctaccatttcttcatcaactaaacatgacctaattgcatgagctatttgaacaagtgctagattaccttcagcagttccatagagttgattatagagtttaaaatcatcaatgcttaccatgataaaagaaccatattcaaatcttttttcatattgacatttttgtaagacttcataaagatagcgacgattagctacacctgttaaatagtcctttctagcttcctgatatgcttcttcataaagaatagcattttcaattgctatggaagtaacagaacttactgattttaagaaattaagatcaattttggtatatctttcttttgatagtttatgtggtaaagcaatcaaccctaaaatcttatctccattttgtaataaagctaaacatccaatattcttttcttctattttttgtcttaataaaggttcaatcttttgataattcaaacttttttgtaatgtttttactaacaaacaagatttttcttgatacaaggaagcaagtaatatttgatccatttgaaaagtaaaatcactatcattattttgaattttatacaaatcatcttgaatgtaaaacaaataaacattctctacttgaagtcctttttttaaacaatcttctaatttttcaaaaatttcctgatgtctttttaactgacttaaaaattcacctaattcttgaatacattgactttgaatgacttctttttttccaaaaacaagatttaataaatattcaagtataatacaaaccacaaccattgataaaacaacaacaaaaattaaaatcattgctatttgatatggttttaataaatacttttctttcataactatatctatatatggaaagatacgataataaatcaaaataacaataatcattgcaacataataacaattcactcttgagatcaataaattcatttcaaataattgatttttatataatgcataaaataaacaaatcgccattggtattccacttaaaacatcaattggaaaacctttaaaagaaggacataacaaacaaagatgtcctaaaattaagatattggctcctaaaaagattggaataagttgtttataaattgttaaatctttcttttgggctttatgaatcgtataaatcatatctatcaaaacacataacaaaataaaaaataagaaaactattgtccatgaaaaatcataaacatatccttgatcaactaattgtggagcttcaataaaaattggaacaaaacaattaattgcccaaattcctaacattaataatgtccaaaattgttgatttattcgtttttcaattcttaaatatttaataataaaattatataatgttggtaaaaacaaaagtattcctactaatgaaaaataaaaccaaaaatttacgaatgggaaaacatttaagcgcataaaaaaagaccccattgtccatgctatcatagctagtaaaacttccataaatgcatatattgtttcatttttcttaatcatgattagtgataaaaacattaataaatataacaataaagcaataattggaataatagcatagtgggtcatttgaataatcctcctaacaaaatacagtatttattttaacaaaaattgctaaaattaacaatctaatttttatataaattgtcttaataaagaaaatattttttctactaaaatatcaaaaaagcaaaaaaatattgataaaattaagatttatcccaatttatcaatattttttatttaactccaacttttatcttttaaaatttcagataattcatctactttaggaatttcttctgtaccaagaatctgagtcaaatcaaaaactcgcgttcccattggtgctttaggtgttatttttttaaaatctgtttcatagaatttttccacaaagaaatatctatgttctattgttcttagattatatccataagtatcgccgtcagtcatagcctcgataatcttttgttttctctcctcagttaattcaccagattctgtagtatattttataccattttctgttccaacagcagtaattatcgcacacacttttccaattgctcgaacacttttatttttataaagacctaaataatcatgggccctaaatccacgttctgcattatcataatataatccgttttttatattaaaatcaaatgttatacctgctaactgcacacgtaaatatttccatgcatcagatatagcaattagtccatcattataacaataatttagataatcatcgataactgcctgcatttcaaaatccctatcatccacaacttcttgaattgcattcgctaagcattcaaatgtagtgttgatatgaataacaggatatttttgcgtttcattgtagttttttaattgttcttcaaaatatttctttttatcatcattcattaactcagaagataaagtaatcattatcttatgtttttcatcaccaaatgatttaagatgattcattaattgcttagaataaaaccaatcagttagcttagtctcaacaacaatcttaaatccttcttgagtaattgtagcatctggaatactatcaatacttttttcttgcaatgtaaatacaagttctggctcaaatgcttcagaaaaatattctgattttaaaaatctaaaaaacttatctgatgaatatgaatataaacgtgataaaagtagcatagtattagctgtagctacattttctttttcatgatatctttgaaaataatgtactttcataattgaaatctccttaattctttcatattatattaaaaatatatcttgcttaatatacaaaataatcatactcatataaaattgagtccatgattgaaacacaagagaaatccaagttacaaaagacatggcaatatcattttacatagattatgtcttttaactatcctcttttttacatcaatttgattatctcatgccttgtgaaacaaaaagcataatactttctacatgtccggtgtgtggaaacatgtcatacaaataaacatcacttgcttgatagccaatttccttgaaccatttcaaatctctcgcctgagttgtaggatcacatgaaacatacacaactttcttaggttgaagaacctttacactatgaataaattcttttgtacttccagcacgtggtggatccataataatactatcgacactttgatgtttgtttgccatttgaatcataaattctgtagcatcatcattaataaaacgaacattatcaatatgattcatttttgcattatttaaagcatctttatatgcatctttatttaattctacccctataacctcatgacacttatcagctacactcataccaattgttccaattccacaatatgtatccaagataatttcatctttttgtggatttaataattcttttaccttagcataaagtttgacacattgttcatgattgatttgataaaaagaacgtgctgatattttaaaagtcaaaccacatagttcatcaacaataaaaccctttccatacagaattttttcattatctgataaaacaacacttgtttgtcttttattaacatttaaaacaatacttttcacagttggacatgttttaactaattcttgacaaaaatttttagagcctttaaacattccatccgtagcaaccaaaacaactaatgtttgatttgttgaaacagcccttctgattaggacatgtttcataaaacctctatttttcttttcatcataaatagacattctatattttctaaatagtgattgaattttagataaaatcttatgtgtttcttcgtcatgtaacaaacatttttgagttggaacgattttatgacttgattcttcgtataatccatattcatatttctgattaaaagcaactataactttatttctatattcatatggatgttccattccctcaactgaatgaacattcaaatgcggaaatagtttctgacattcctcttgtttttttacaagttgtcgatgataatccatattgatatattgacaacttccacaacgtttacttatatcacatttcataaaaaatctcctttcaaatgagaaaaggtaaaagcatttgcttttacctcactttcatacacatgacagaaagggatttgtcaatacatgaatatcaatatattcggtatgaaagctcatatgtaaatgaacatgtaaaacatgctgactccaataaaaaagattggcaactggctgtcttatcttacgacttagaccctatagctttgcgtcactatttttcaatagtttagccatttacatatctgtttatattataacagtctttttcttaaaagtatataaactcttataaagtttcaattattgaaataaattttatataagaaaaagacaagctgtaacttgtctttatgctaaatcctcaccattactttcaatgacttttttataccaatagaatgaatctttaggactacgtttcattgttccagttccatcatcatgtttatcgacatagataaatccataacgttttctcatttctcctgtaccagctgaaactaaatcaatacatccccatgtcgtatatgctcttaaatctacaccattatcaatggcttttttcattgcttcaatatgatcacgatagtaatcaatacgatatgaatcatggatagaaccatcttcttcaacagtatcaaaggctcctaaaccattttcaacaaccattaatggtctttgataacgatcataaatcatttctaagtaatattgtaaaccatcaggatcaaatgcccaaccccaatcagaatacttcaaatattcatttttagcaccagttgtaaaatttccaccaacttgatctttaatttcatgagttgtaactaatgaagacatgtaataagagaatgtatacatatcaactgttccttcttttaaatcaataagatcttgctcagtgatgtctaattttacctgatgttcatcccataaacgttttgcataagttggatattttccaaaacattgaacatctccacaatagaaaatagatttttcccattgatgacgattagcaataatatctttaggatcacatgttgcaggataacttgtaattccacagatcatacaaccaatcatattttcaggatcaatttcatgtcccatcttcacagcatgagcactagcaacaaattgatgatgtaaatgttgataagctctttgataatcttcttctttagcttcatagaacaagcctaatcccataattgtattatttatttcattaaatgttaaccaatatttaaccaatcccttaaattcttcaaaacaagttcttgcataacgatcaaagaattcaattaattttcgatttgaccatcctccatatttttcaatcaaatataaaggtgtatcaaaatgccaaattgtcaccaatggttcaatcccatattttcttaattccttaaaaacattacgataaaattcaattcctttttgattaggttgttcttcatcaccatttggataaagtcttgaccaagaaatagacattctaaatgttttatatcccatttcagcaaacattttaatatcttccttataatgatgataaaaatcaataccatcatgatttggatataaacactcatctaaacaagcaaaatgtgcaccttcaggcaattgtacttgtccttctgaagtcaccatacgacaatgattaccatccttgtcaatataagtcacttgtctactttctttgactgagccaccagtcgttacatctgtcaaggcaggtccacgtccgtcctcgttccatgccccttcacattggttagcagccgttgcgccaccccataaaaaatctttaggaaatcccataatttatttacctcctttttcctattgattacaatatttctaaaaatgccactaaaaattgataagtctgataaaatgattttaattctaatctttcatcaggtgtatgaatatctgccatatttggacctaatgtgacaatatccaattcaggaatttttcctttaaaaactcccgtttctaagccaccatgagtggcaacttcacgtaatgcttgacctgtttgtttatgataaaaagcttttaattgttctcttaacacagaatgaggatcataatcccaaccaggataatcattagaaacctctacataaccatcataaagagaagcaaccaattccaattgaagggataattcctgtctaatactttgtaatggtgaacgaatggaatattcaatttgaatacaatcatccaatgttcttacaacccccatatttaatgaaacagttgtcaaaccaggaatcacctgtgatttttcaatcaatccattaatcgcaagatacatcattgaaataatagcttcactatcttggaaacgaatacaaacatcacattcatcttcataaatattaagtttgaaatccggatcactattagctaactcttgacgaatatcattttcatatgcatcaagtaattgacaaataagatcatacgaactagaacttgcaaaagcaacacgacattcacgaggaatagcattgttttttagtccaccagtcatttctaccaaacgaatatcaataccttcttttaataaatgatacataattctagctgcaagcttattcgcatttcctcttgctttatcaatacattctccagaatgtccacctaacaatcctttcacttctaaaacatagactggtgaatcattatcttcaccaatgatttgtttaaccattgttaaatcattacccccagaagatgaagtacatgtttctccttctgtctcactatctaaaccaatcattctttttgccttaagaatacttgtatctaatcctaaggctccacataatccaacttcttcttgaactgtaaaaacacattctagaggtggatgttttagtgccttgtcagttaaaatagctaacatataacaaactccatacccatcatcagcccctaaagttgtcatagcagcatgtaaataaccatcttcaacatataaatccaaaggatcattatcaaaatcatgatcactatcattattcttttcattcaccatatccatatgagcctgtaacatcaaaggttcatgtttttcatatccttttgaagcctctttaaaaataacaatattattcatttcatctctataatattttagttcatgttcaattgctaattgttcaatataatcagcaattccctcctcatgataagaaccatggggaatctgagcaatctcctcaaaataacgattaatcaaaatactttcatctaaaacagccataatcattctccttccattaaaaatctcgcaaaataagttcggttattcctggatttattgataactcaacacgctttaccaaaggatgctttcgatacgtttttctaatcatatcctttaaagccgttcctccatgatatccatgaataatacgaatcatatatgttgctgaagatgctttcttcaatgttgcatctattcttgtcctggcttgaaactgattcataccatgaacatctatttcaattattcctgcattcatattttcaccactattcattataacaattcttaaattaattgtctattcatccatttaccactgaaatatctccatacaaagaaaattacacgaacaatccaatcaacaaacatcgcaatccaaacaccaattaaccctaatcccatatattgtcctaaaacatagcttaaacaaaatctaaaaatccacattgatgaagctgatacaatcattgtatatttagcatcattagaagctcttaaagcgttagggaaagtaaaggatattggccaaacagttgcagcaaagaaaccatgcataaagatacattgataagctaaatcaatagtttcttttgacaaagaataaaaagttaaaattgttggtgttgctaataaaataatagcaattaaaacaaacattgaaagataagtgattttcataattttcttaatataataacgcgcctgttgataatcattagcaccaacacattgcccaactactgtaaccatcgcaagtcccatcgccataccaggaataatttgcatttgtgcaatattattagaaactgcatttgccgcaattgaataagttccaaatgtggcaattaaactttgaaccaatatctttccaaattgaaacatcccattttctaatcctgaaggaacaccaattgataaaatcttcttaatataagtaaaatcaaatgaccaatgtttcatatcatcaattcttaactcattatcactatgaataagcatatacaaaatcacaatacatgccactgccctcgcaatcaaagttgctaaaacagccccaaatacaccccattgaaaaccaaagataaaaactgcattcaagacaatattaatcgcattcataattgcactattaatcattgaaatcttagaatttcctactgccctaaacaaagctgctccagaattatacaaagcaataaaaggataagaaagcgctgaaaataaaaaataaatttcagcatttttcatcacatctacttcaacattaccaaaaatcaaatgtaacagtgaagcattaaaaaagaccacaataaccatcattatcgccgataataaagccgtaatcaaaatcaattgtttagctgaatatcgtgctttttcatgggcttgctggccaataaactgtgctgccacaacggctcctccggttcccaacgcagcaaaaatattaattaataaaatattaattccatcaaccaatgaaactgctgaaacagcagcttcgccaacatttgataccataattgtatctgcaaaaccaactgtcacggctaataattgttcaatgactaatggaatcattaatttctttaaatcacgattagaaaataacatattcgttcaccccacgaacctattataatcctaaaaatatttcttttgtacttctttcattttttgaaattcacgttttgtcaattgacgatattgtccctcttttaattgctcatctaataaaatcccagcaaaactcattcgctttaaggcagtcacttgattaccacaagataaaaacatcttcttcacttgatgatatcttccctcatgaatcgttacataacaatgaaagtcatcaataatctctaaccttgcactttgacaccttattttttgatcaatcacaataccttctttaaaaagatcaattaattgttcttttaatggtttcaaaacagtgaccaaatatgtcttttcaacatgataatctggtaataataatgctttagataaagaagcatcattggttaataataaaaaacctgttgtatctttatctaatcttcccacacaataacaatcttttctatcaatcaaatcaataacacaaggatactgtttatcatgattagcacaaatatatcctttaggcttattcatcatataataaacaaaaacatttgtatcaataacttgtccatcgacttttatcacatcatcttcattcacttgaaaatcaatatcactgataatatcttcattaacgtgtacatgaccatgttttatcaatgtccgacattgtttgacatttcctaattgatttttcattaaaataagatataaaggtttaatgagtatttcttcctctccaacaatcatttgaacgaatgttatcattatttttaataacgatacaaacctctcgtccacgtttataatgaggattgtctttaagaatatcagttaatgctgataagcgtttatgaccatcaacacattggtaatgatcaccattttgataaaccgcaatcggaaatgaaaaaccaatacgaacaatcgaatcataaagttcttttgaataagaacaatagttaaattcaatggatgataaatctattttatgaatacgcacaaaatcacctctttaaaattatatcatttttttcataaaatcaaaatgattatctttttactttatatcatgatataataaaaaacaagggaggtaactatatgaatatcttattaagtcgtatcctcacatatttaaatgggacattatttcatgattttcattataagatttgtacttttgttatttttcattatttagaaatggaagatatgagtgaagaaaagttcttagagttgggaagttttaaaaaagaagaactctatgcttttatagctttattaggatttaatcaatatgaggaatttagagaaacattagtgaatcatcatcagacacgtttaaatcaaattagagtaagaatgcttggtgttgatagtcgagattttattgaaaaaatggataaagattgtagtgatgatgaaatggaaactattattagtgatatttgtgctaaattatataaagcgaaaagaattgttgtttttggtgctttataccctatttctattgcgattgaactacaaactgatatgattacttttgggaaaccttttattcaatatcatagctatgacccaattgttatggatgaaaaagatgttgcaattgtaattagtgcaactggtagatatctagaaggatttaagaaatctaaagaagatgttcatattgaaaatgctcaacaaatcttaattacacaaaataagaaatatttaagaactgaaacaagtccaaattgtaaagttatttatgttccaggtaaatttgatagtattaactttaattatcagattatgacgatttgtgatttaatacgtctccattatttccaacaatactatttataaaagagttgattgatatcaactttttttgtgcacaaatagatagttatgcacattttattgtgcataactaaaaagatagcaacaattagttactatctctcaacaatagacgatcattataatcatgtgtagaagtagaatacaaatgaatcaattcatcaacagtcatattctttcttctctctccttcaattaaagcaataatttctccatctttcataatcattgttttatttccatatcgaagtgcatcttccatgttatgggttatcataagggttgtaatatggttttcttcaacaagctttgaagatatagataacactttttgagctgttttgggatctaaagctgcagtatgttcatctaataaaagtaattgtggtgtaacataagtcgccatcaataaagtcagtgcttgtctttgtcctccagataaagttccaactttgacatcaagcctttcatctaaaccaagattcaattcttttaaagcttgtttcatttcttgtttatgagtgtgagaaaataatttaagactaaaatgtttacccctttgtgatgctaatgaaagattttcttcaattgtcatagatggagcggttccttttaaaggatcttgaaataatcgtccgatgaaacgtgaacgttgatattctggcatatcacttaaatctttttgatttaaaataatctgcccctgactggcttcaactgccccagcaatcgtttgaaataaagttgatttcccagctccgttgctgccaataatagtgacaaaatcaccatcttctaaaaggagattaatatgatttaaagctactttttcattcacagttcccggattaaagacaaccttgacatcttttaactctaacatcttttcttcctccttttcatttgtgttgatgcaattgctaagacaactaataatgcagataataatttcaaatcacctgaaggtagtcctaactgcaatgctacagttaaaatacctcgataaaagattgctcctataataaccgcaagcagctgaaatataatcttatcttttttaataaaagtcataccaacaataatacttgcaagaccaatgaccatcattccagtcccactattaatatcagcaaatgtttgatgttgtgtaaaaactgctcctgacatagcgacaaaaccattcgctaaagaaagacctagaattttcatcttatctgtatcaatcgaacttgctcgaaccatgtcttcattatccccacaagcacgaagcgctaagccaagttgtgttcttaaaaaatagtgcaaaaataatgcgattaggaaaacaatgagaccaataagaatcaatttatcataaggctgtaaaaatgataatgaagaaaagattgttgattcttcaaataaagaaatacttggagaatcattcatgattcttaaattaatggaatataagccagtcattgttaaaatcccagcaagcaaaggcatgattttaattttagtaatcaataatgctgtcacaagaccagcaaaacaccctgctaaaaatgatacaataatccctaaataagggtaagagtgaacagtgaagattgcactcactgcacaccctaaggtaaaacttccatcaactgttaaatcaggaagatttaaaatcttatagctgatatataaaccaagtgataatatagcaaatattccacctaattctaatgcacctaaaatgattgtcatattcataaaatcaacccctatttcatcattgataatgacttgtcatttgatatactatctggtaattgtattcctaattgttgataaatcttttcatttacataaatatttaaatgatctttaaagactttgacaggaatatctttaacattctttccttttaaaatctgatcaaccatatttgctgtttctttccctaaatcctcataattaataccaacacttaagaacccaccatcttgaaccattgaatcagccccaacatataaaggaaccttcgctttcacacaagccttagaaacaacattcatagcacttgctacagtgttatcattcggtgcaaagatagcatctgattttgctgttaaaacatcaattgcgctttgaacttcattaacccctgttaccgttgcttcaacaatttcaattcctttttccttagcaaaagcttttgctttattaatatttgtcactgaattcgcttcacctttgttataaatcacaccaagtttctttaattgtggattcacttgcattgccttttctaaaatcaactccacttgaatctcatcacttgttcctgttatattcttatctggtttttctaaagatgaagttaattttgctccaattggatcactgactgcggcaaagacaactggtgtatcagtcgctaattttgctgctgattgagccactggtgtggcaattgccatgacaacatctggattctttcctttaaaatcctgaataatacttgctgcagtgttgttatcaccttgagcattcttaaataaatactcaacattttcaccatctttataacctaatgtttgcatttgtttatcaaatgcatttttaattgtattcaatgatgtatgttcaacatattgaataactgcaaccttcttaacatcttgggaagctttttcacttccacaccccactaataaacttgtagctaacgctgctaccatcatacccttaactaattttttcatttttctttctctccttttcatttatttttttattaaatcaaaagaagctacaccatcgttttctattcattacaattcccccctcttgttagcataaaacaaaaaacacctgtcctatcaaaggacagatgtaataatctgcggtaccacctttattggttacaatgaacccactctgtaaaatgctaacacatttttgctttataacgtaagctcacgtcgcaggatactcgttgcctttcccctttgccctcgtaggtccatttacttaactgccactatctagcttccaccaccctagactctctaaaagtacatctttaagttttatctcctactcattggtttgttgtatacaatttaacacagaatttatagtgtgtcaataaaaaatatatttttttgttatttagataaaaacagaagtaaaattaagtatatttataaatagtaagtttattttcttattacataataattcccttctgtactcttttgtactttaactgatacttgacttgcatatccatctgtagatattgtcccatctggagcaaaagtatatgaatatgcagttaatgttttcccttcatcattctttgttatttttttatcacaaattaaaaattcataggattgattatttgttttaagaattgtccaagataaattatctatatccattccttgatttaaaaggaacgtcctaatccgagatccaacaccatttagattggcttcagcagcggttgctgcctcagagtcaatctcactatgtccattaaaaaaatttttaatttcattcataatagagcctgatccagccataacctcaatcacattatcaatatgaaaatctttatcaattctaagttctttaccatcccatacaacaaatacgttatcaatataatatctcattctagtgacattactattaaaataaactaattctgtcaatattcctgatccattcgctttatcaacaatttcttgtctttgagaacttgtataagaatgagtatcatttgttgaagcaatatctacttcattatagcttccacctaatgataatttatttactctatttcttgcaacagcaagaacattttgtccttcatttaaaattcttttttcatttacatcatcaaaataactcattgatactggaactgctacagccattaaaacagctaaaataacaactgttacaataatttctactaatgtaaaacctttttgattattcaaggttatcacctctaaatcatttgctgtaattcagcaatattatcagtatattggatagcactttctcttgaaatcttaccttgtcttaaaagagaaaccaagcacatatttaatgattgcataccaaattgtgagccagtttgaatcatactattaatttgatgacctttattttctctaattaaatttgcaactgctggtgttgcaagcataacttctaatgcagctacacgtgattttccatctgctgtaggtattaattgttgtgtaacaacagcatttaaaactcctgaaagttgtgtacgaatctgctcttgtttatgaggagggaatacatccacaatacggtctattgtttttgctgccccaattgtatgaagtgttgaaaaaactaaatgtccagtttcagctaaagtcataacggcttgaatggtttcatagtcacgcatttctccaactaatataacatctggatcttctcttaatgcactttttaaggctgtatcaaaggactcaacatcaaactctacttctctttgatgaattagtgctaaatcttgtctataaacatattcaataggatcctcaattgttaaaatatgacatttacgatgatgattaatttcattaatcatcgcagctaaagtcgtagattttccagaaccagtaggtccagttaataaaaccaatcctctgttgtcttttgttaatttattaagaattggaggtaattgtagttcttctaaagaacgtatacgttcatagataactcttaatgccgcacataattgccctctttctttataaacattgactctgtaacgatttatattttccacataaactaaatcaatatctttaccagcatttaatctttctttttgattttcatccaacattgataaaatcatttcaactacatcttcagtagtatatgagtgttcataaggaaaaagtatcccattattacgcatcataatatgattttccccacctaaatgaacatcagaatatccattattacgagcaagatgtaaaatatcatcaagtctttgcatatgactacctcctatctttcataatatgaaatctttaacaattcattaactgttgttttaccttcttcaactagttttaatgtttcttcaaataatgaatgataattttgattaacctttacataatcaaaaatatcactaatatcatttttatcactaatcattcgacgaatacgtttatcaatcaaaatcatttcatgaacagcaatacgtcctttttatccagtatgatggcatgccggacatccaacactttgataaacatattcaatatcttttcccattatacgtttatcatcatcattagcctttacttttttagcacaatgtggacatacttttttaactaaacgttgagccacaatcccaacaacactattagaaaccatataaggttcaatccccatatcttcaagtctaacaatcgtactaatcgcatcattcgtatgcaatgtagatacaactaagtggccagtaatagcagctcttacagaaatagaagcagtttcagcatcacgtgtttcaccaaccataataatatctggatcctgacgcaaaatagctcttaaaccactttcaaaagtcaatcctgctacattattaacttgcatttgattaattctatctaatgttttttcaactggatcttcaatcgtcaatatgttcacatcacgtttagctaacttttccataatcatatataatgtcgtagttttcccagacccagtcggaccagttacataaatgataccattaggattatccatcattttcatcattttttcataattttcatcattcataccaaaatgattagcataatcaataggtgtattagaatttaaatatcttaaaacaattttctctccatgaacagttggaacaatagatacacgaagattcattctttctccattaatcgttataacaaaatgtccatcttgaggaattcttttttcagaaatatcaagattcgcaagaatctttgtacgaacaaccaaagcattgtgaatatttttttgtaatttcatggattcaatcaacattccatcaattctcattcgcactaatgtttcattatcaaatggctcaatatgaatatctgaaacattactattaaaaccatttgttaataaagaatttaataatttaacaacaggtgtatcatcagcttcactatcaaaaatttcctcatcagacatttgaaattgattcgtttgttgattcgcaacatccgcagcatttctagcacgaacctcagaataataatatgaaatagcattttttactgcttctgttgtcgctaaagaaatagctaaatccattccagttactaaacgaatatcttcaaaaccgtagaaattcattggatcacttgttacaacacctaaagtatttcctttaatctcagtagataaaatattatattttttagctaatgtttcaggaattctacttactgcttccacatcaatattaacattattcatatctacaaaaggttcccctaatttaactgataaagcctgcaatgtttgttcttctgttacaaaacctaaatcaattaaatgctgacctaatctcttacttctatcattcttttgagcatctaaggccaattgtaactgttcttcattaatatatccttgttcttttaatacctcacctattggtatcattttcatgatgtaatcacctaacttcctcacattttatttattcatatttctcccaatttgtttgattatatacttcattattagggtttgtcgcaaaatcaatgtcttttagtgctttgatatatttgatactatctttaccatataaaacaatatcatttttagcatatgaatttgtacttttaaaatcaacacatatttcttgccaaccagtaatccctgaattataaggtgttttatttgtattaaacaacttaataaaatatcttacataattatcctctgaaattttatagacttccccttgttttggatgctgtggatcatcaactactggaatatttgtcatatctatagttaaaggtattgctttttccaaattaataccttctaattttctaataatagtatttttctgtttaacattttcatatagcactaatccatgtttgccatctttagaaaaagtttcatcattagaattaaccaattcccatcggttaggatcattgcttggtttggttccccatattcccttattaacattacttactttacagcgataatattgtccattgtcaatgacaacgtctcctacctgataggcactattatcatggaaatgactatctatacatttccaccacatttcaccactccctggtgaagtataaatagacaataaatctttctctgaaccatttccatatatcagcatccaccaaaatccatctttataaacaaaatcattgagattatataatctttgatctgcttcttcccacttacctctattattaataggagcaaggaaatcaatttgatcagccactgtcccagtaaatgtactttgagaatcatcttcttcacctttatctacaatatttgaagaagatgattttgatttacgaaaatataatctatatccattttcaacaagatcaaccttattttgagtaaacaatccctctttttttatgttatcactgacttcaacatttaaaaacataactgtatctctggatgaatatgtcttttctccttcagcattccaaaattcataatacaaatcaactctagaaccattttggaaatttccttttgctttcatttttaattccttatgagaataaaaactttcgttataaattttttcattatccatatacaagattttatcttttacataaaagcaatgccaatcatcttcatcattaattttaggtgcatctttatcattataagacataagtcttacatcataggaatattcagcttcatcacgtacgaattcaataattgaatctaaagctcttttatcaatatcataatcagttgttgttgataaaaaacctgatgaagaaacaatcattgttccagcaatcaatagcacaatggaaccaatcgctagagatacaataatttcaattaatgtaaaaccatttttattttgcctcataataatttcacctccatttttatcacttgtttaccattctaagataaacgtattcttcatttacaaaatcattgagaaaattaccactgtttatttggccaaaaggatactctacattataaccgtctgctttaaactttttaccatttaattgagaaaaatatttatcatattcatactgatacaatttaagctcaccattcactatataaactgggcaaaacataacactatctccaactataaaatatacaccttttaattggccagagtgattaggattatcagtataaatgtagccatatacatcatagctatctacatctacagaagaaagacttatatttttctttataaaaaaccaacgaactttgatatcatcgaaattaccagataagtaatcttgataataatttgaatcaatataagaatcacttgtcccaaaatgactctttacatcatttttaaccgtctgtatatcaggaagattattatttccaattgtattttcaattccatcaacattaaataattcattattttccaaagatagtaaatcaatttctttatttgactgatataatctaaatttatcatcagcaggcatttcaattttatttgaaggtaaatcataaagattatataaaaaataaaagttagcaaatgattttctctctggttcaacttcttcttgtttatcgtcagaactaaaatctgcacttcttataggtttataataattcaacttaattgagtattcatcatcaacaaatgttgtcttagaatatttattaaagccaatacttgcggtagcagttgtacctttaaaactaacaatcatatcttttgtatttgcatcttttattgattcattagccaacaaaacttcatcatataatgcatttgtctcatctttaataacaacaccgtctgtaaaaactacacttacattataaaaaccaaataaaaacatagttccagcaattgctaaaatagcaaaagtaataatagattcaattaaagtaaatcctttcttatttaattttcccactattatcacactcctaaaaaacatcttctttgtattcaatacgataccataattcactgtttttattttctttcttcatcttcttagtagtcaattgtaatttaacggtttctcttgcataagttgatgtcacttgaatataaatagtattttcatcattatcatctaagataattttagctgtcactgttccaccagcattatctggtaatttaacacttgtaatttctataggttgtccttttttaggtaagaatttcgttccctgtcccgatggtgtaggcgtaacatcataaccttttatattatttaactgtcctgcaatcccatcagcaacagatactgcatttaaataagcttgctttcgtgcatgttcgttaattgatcttttttgatatgaagttgcaatagccagtgcagtccctaatatgatgaaaataattagaactataactattcctgttacaattgtagaacctcgttcattcatctttttcatcatttgcacctcactttattgttctgccatataaaccacaatttctaatgatgcagttgcaggttttgttggatcggtagattcactaaaattaaatttagaaatttctacacctttcatcttattaaattcatcaattgtttttgttatttgatttaatgttcccgttactgaaacattaacttttgcttgaaagacataatccttttcttcttgttttttctttttctcatcagttttatctttactcgtttcatcatctttgtctttttcatcagttttatctttttcatcggttttatctttttcatcagtttttgttaattcttttattttttcatctgtttcattagttgttgtttcttttttatcatttttagctttttttatttccactgctgtaacatcagataatgttaatgatgtaggtgtcaatccttgtgataaaaaagttgttgttattaatttatctattttttcagtagataaaataggattataattttctataacttgtttcaaattatcttgttcaacttttaattgatcctgtgcactcaaatattgggataaatccgtttgaatagaagcattttccattagaatatcttgatattctttatttaatacagtatttttatctaacgctggaacaataacaaagaaccatcctcctacaactattaaaaaacaaacaagaaaatacaataattttttctctcgactagataattggtctacaatttctttcatattattgtgcacctccatctaacaaaataactatactaaatgaataaaatgttgtttcgctggttgttgttatctcgcgaccagtcaaagcatcaaattcaccagtaccaacagtgtttgtttttttcgtttgctgataaccattataagaaatattcgtcatttgatattttgtttttaaattagaaatatatttttcaatattttgaacattcattgaagtaaatgaagctgcaattgtttttgcttcttgatcaaagcttaatgaatttaatgtcatatttgataataatgaattttttaatgttaaaacttgtttttttgtaagttctggtaaacttgcaatagtgttatcaacagattgtaatgatgaataagttgcttttaatgttgctaacttataatatggttctttatcagtagcatctattttcaattgaatttcttcatttaataattgaacatcatcaattttattttggactgttctattcatcacaaatataaaaataaatgccattgcaaaaataagaaataatcctaaaggaatacttacatattttaatacttttgatgactttgaaggaccttcttttcgattataggccgcaagtaagtctaattctttattttgaattctaaacattattaacgacctcactttcttttaaaatatccaacacaataagcataatcattaatatcaaaagattcttcattattattgacagcatatatcgcctttgatttaggcaatcgattagcaataatgcctaaagaagttcttattctatcaaataacttttgctctttttcttgatctaatccaaagaaataaatatctgttaatggatgatcttgttgacttgatgaagcaaattgtttcaattgagaaataactcctataacttcattttcaaattctaaagtccccttagtagaaaaaattcttgaacgatttgtcaaaatatattcattgttaataaacaaagcactgattacattttgaccatctatttgggtgattgcatatgacttatcaagaaatcctgctaattgtttaacaagactcattaaaacattaatagcataatcaattgcaacaatagcaattccagattcattaaagacttccaaataactatcaataaattgtctttctactcctacacaaaagattttacttgcacctttaacagtttcatcatctcctatataagaataatcatacacaacatcttcactattactatcaacagtagataattcatctttaacaaactgtaagatttctttttctcgcatttttggaatactagcagatttagccaaaatttttgcactatctacaaccaaaacagcttcagtaattcccttatcatatacaacttttaatttctgttttaaatcataatcatcaataatgaccccatttaacattgttccctcattaagaggaagttgaaaataatcattaactcttaaaacatctcttttagattcagcagtcacaacagatatattctcacttgaaatatatatcactgttccatttttcatagttataccccctcttagcttgatccaatgcttccatataaagaataaagaggaagcatgactgatataataattgtacctataataacacccaaaataataatcattaatggttgcaataatgtcaccattttttcagttgccagttctgcttcataatcaaaatcatcggcaacatttaacaaagtttgatccaatttaccactttcctcaccaatataaactgaacttgcaagtttaggatcaaacccatcaataattgaaattgcttgacttaaatttgttccatcacgcacctgtttaatgacttcatcaaattgactggctatataaacattattaattgttcctcttgccaaagctaatgaatttaacattgatactccacttgtgtaaagtgaactcatacttctagcaaaacgagcagtatagataatttttgttagatatcctactttaggacaatgtaccttaaatttatcccaagcaaatcgtatcttagtcactctcatactcattgtaataatacatattataattaaaactccaattaaaaaccattcccaattagctatcattgctttagaaatcccaaacataacttgagtaatcaaaggaattggcgcatcaccaaacatatcaaagaaattaggcaaaataagtgtaaataccgcaatgactacaaaaatcgttacaataaccaaaatcatcggatacatcattgcactctttactttattttgcaatttattatctttatcaaattgtgttgcgagtttcatagatgtcttatctaacattcccgttgattcactagccctaaacatattaatcataagtgaaggaaacatttctccttgtgcagccaaagcatctgataacgacaacccttgttgaagcttaacataaatatctttatatagggcctgtaactttggattaggtgttctttttgctatgatattcattgccatgatcaaagaaataccagaagaaaccatcgttcctaattctctacaaaactctgataaatcatttaacttcatttttttacgatcttcttcttttacaatctctttacatttcaaaagatataaattctcagaacgcaataaagcgacaaattcttcacgagaattgacctctctcttgccatgatatttcttagaatttatatcctttgcaatatacttaaacgttgccataaacgttccatcctctcatattataatccaaacaaagctaaataccagcttaacaattcattcccatacaacaacgatacaaacattccaaaacaaatataaggtccaaaagcaatatgacctttcttatcaaccttatgtgttaacatcaaatatcctgcataacatccagcaataataacagctataaacatgccaaccaataccaatttccaacctaacattaacccacatacagcaatcaatttgatatctcctccaccaaaacaatcaggaataatcaagttcattaaatacattggtccactaacaataaaaaatccaataagacattcccacaaactattatgattaaaaggataatacaaaacacaaacaactaaacaagcaatcactaaagaattaggaattgtcattgtatcaaaatcaatcattgtaatagccactaaaatcattgcaaacacaaatgaaatcaatgtcatccaatgaatcccataacgataaaaacacaacattcctagcattccaccaataaactccaatatcgtatccctcataggaataggtgaacgacaatatcgacattttccacctaaacacaaataactaacaattggaattaaatcaatagcttttaattgatgttgacaatttggacaaaaacttcttccttttgccacactgattcctaaaggcaagcgataaataacaacatttataaaacttgcaacacaagttccaataacaaacatataaatatacaagaatacaagtattgtttccatcatttatcacctttctattattataactgatttgcttaaagaatgaaaccctctctcaaaaagagagagggtttaaaagcctattttaattccttacctacataaacttttccatttaattcgatagcaattcctttaccatccaaattaaaagtcattactttaaaatcaggactatccaatgttgtagtaccaactggagctgtaattgaagtaccagtaacagttatatcatcacctttttgagtaattgtagcagtaacatataacttaacgttagttgccatcttatctttacctatagctgtattgatagttccttcgttatcttttgtatcgcttatcattgctgcccattcagcttcgtcaattttcttatcaccagcataagctttagccatttcagcttgagcagttgtcataacagttcttgcttgggccatatatttagcattatcagcttcgcttaagtatttcataactgaaggtactgcaacagccattaatacagccaaaataacaactactacaatgatttcaattaatgtaaaacctttcttattcttttttaattctctaagttttttgatattcatttcaaaaacctccctttcatacttagattataataccaaaaaaaggattcatcaagaaaaatcacaaaaaaataacaaataaattgtaaaaatatcacaacttatgggttttctcgctgattttgtaaatacatgtagaatgtcaccataaaaatcacaaaatatccgataatagaaaggtaatctgggatttgtccaaaggcaacaaatcctaataatgctgcaaaaataacttgtgaataatcataaatagagatgtcacgaccagcagaatgtgagtaagcagctgttactgcaaattgtccacctgcagcagcaattccagctaataataagtaagcgatttgttgaaaagtcataggttgaaagttaaatattaaatgcggaacaacactcaaacatgaaaagagtgaaaagtaaaagacaatttgtggtcctttgactcctctttgtgacaacattcttactagtgtataagccatccctgcactcatagcacctatcatagctattaaagatgcaaatagctcactatttgcaaagcttggtttaacaacaaataacattcctataaaagcaataataatagagaaaatttgttgtttggatactttttcttttaataatagaaaagaaaagataataacaaaaaatggggctaatttttgaatgatggatgcatctgataacaataaatgatcaacggcatagaaattagcaataattccaattgttcctaaaatagcgcgtaaaagcaagataggaacatttttcttttccatatgaaagcctaccccacttttctttaagattgctaaggcgataaacgcagcaataaaatttctaaaaaaactcttttggatagccggtaaatcaccagataatttaacaaataaattcattacagcaaaacataatgctgatataacaataaacataattcctttgtttttcataatctcacctcaatgttcattaatatatcttattttactctatttgtaaaaggaaatacttttttaattccactaaataaccatagcattctattttaaaaaactatataataatgacaagggagtgatattgtggacttaaaaaatgggaaatatcttctagaaatttatcagcattgtaaagactttcgacgtttctttttaggaagtcattatgatcatatttttcaatctttattaaatatattaaataatattatggaagtagataatatttgtggtttcttttataaaaatgatcgttatccttatcattattacagtgttatttctcatgattatgatgaagaatttgatcaatattatcaacaacttaatcaacactatcatttaaaagaaatcaaaccacaattagaatcatatttagaaaattatacttttgtttatggattaccattggattgtgaagataaattttatggttatctctttttctgtcgtgatgaaaaagattttggtaaagaagaacgtgaatttttaaatactttaagtcaaatttatgctgatatttttaataataaagaaacctatcaaagaagaatttttgatcaatcagttttcggaaagattttaaatagtgttcatgcgaatattactattacaaatccattaactgatgaaattctttatatcaatgatactgctaaaaaaacatatcaaatcaaagataatgtaattggtttaaaatgttatgaagtttttaaaaaagatcaaaaagaaagatgtcgtgtttgtcctttaaatcgtttattaaagaaccctaatgaatctcatacttgggaagaatatagtgattataaacacaaatattttcaaaatcatgattctttaattgaatggtttgatcatacgattgttcattttcaatattctattgatattactaatctaaaagaaattcaaagagaagcacattatgatagtttaactgaaatttttaatcgaagaactggtaaaaaagctttaaatgaacaattattaaaagctaaaaaagaaaataagaatttaattgtttgtttatttgatttagatcatttaaaaacaacaaatgatgcttttggacatcaacaaggagatttctttttacgtactgtaagtaaagaagtcactacaatattaaatcatgatgatattttctttagattaagtggtgatgaatttgttgtatctttctatgataatacgatatccaatgttcataatttaatgactcaggttttaaatgttttaaaacaaatcaaagaacaagataatattccttttgatttaagtttttgttttggtttgtatgaagttggtcctcaaacatctttatctattaatgatattatcagtgaagctgatgaaaagatgtataattttaaagtcaaaagtcaccttaaaaaagccatgcgtgaattagacttatcaaaagttaatgtcaatgaatttacttataaccaagaattactttataatgctttagccaaaagtacagatgattatatttttatatgtaatatgaaaactggggtttttaaatatactccagaaatggttaaagaatttgatttccctagtgaagtgcttacgaatgcagctgctgtttttggcagcaagattcataaagatgataaatatgaatttttaaatagtaatcaacaaattattgatggaagaacggatagtcatattgttgaatatcgggctttaaataagaataatgaatatgtttggttacgttgtcgtggacatgtggaatatgatgaaaatggtgaaccatgtttatttgccggatttatttctaatcttggaagaaagaattatcgtgataatttaacaggtttatataatggctttgaattagaaaaaaggattcaagaaacaacgagtcattttgcaatgatgattttaaatattgcaaactttaaaaatattaatcaattctataatcgccactttggtgatcaagtcttgagaattgttgctcaaaacttacaaaccttattacataagcaaacaactatctataaattagatggtgatgaatttgctcttatactaaaagatgcaacaccgcaggatttatatcaagtttatgaaaagattcaaaagtatgcgaaacaagaacattcttatgaaggcaaatcttattcatgtcattttaatgctggagcagctttttcaccatatgatggaacaacttattctaagcttcgtcgtaactgtgaaatcgccctgcagcatagtaaacactatgcctatggaaaattaaccctctataatcaagatattgctgataaaagaaatcagaccttacgagtcttacatgctttaaaagaatctatcaacaataactttgaaaatttttctttagtattccaaccaaaagtcacttcttcttatcatgctttaaccggttttgaagccttgattcgttggaatcaccaagatttccctcacatcggccctggtttctttattccgatgctagaagaaagtggcgatattatacaacttggtgatcggatttttgaacaagctattattaaactcaaagatttttcacgctatgataaagatatcaatatgagtattaatgtttcttatttacaattaatggatgataaattcgttgattttataaaagaaaaagtaactttacatcaagtgaatccttatcatatcattattgaattaacagaaacatcaattgctaaaaataatgaattaattgttaataaaattcaacaattacgtcaatttggtatgcgaattgcaatggatgattttggtactggttattcatccctatctttattaaagaatgaacctttggatattattaaaattgatcaatcttttgtaagaaatattactgaagattctttcaattatgcatttatgaatgctattattgatttatgtcatcaaattgatttaaaagtcattgttgaaggggttgaaacaaaagatgaattagatgttattgaaaaatttaatcctgattatattcaaggatattatacaggtaagccaatggattataatcatgctatttgtcttttaaagaaaaatattgacaataagtcataaaacatttagaatagtcatgcactaaaagctatagatttctctatttctgattataaatagaatatctatagctttttttatgaaaggagtatctattatggaaaataaaaatccgatgggttataaaccgatctttccacttttgatgtcaatggcttttcctccaatgatatcaatgcttattcaatcactttataatattattgatagtatctttgttgctcaattgggagaatcagctttaactgcagtttctttaatttatcctttacaaaatctatctttagctttttcttgtggaattgggattgcaatgaatgctattattgctagacatttaggggctcacaatgatcaagaagcttctgatgttgcaagtcaagggattgtgatgagcttattacattccttattatttattgtgattggtttattttttattcgtccttttgtttcgatgttttcatctcatcaagaagtgattcagtatggtattcaatatggaacaattgttattacttttacatttttttcttttgttcatttagctattgaaaagatgtttcaggcaagtggagatatgattattcctatgattatgcaaatcgttggtgctgttgtcaatattgttttagatcctattttaatctttggttactttggttttcctgctttaggtgttaatggagctgcgattgcaacaatcttaggacaaatgagtgcttgttttttatctatctatcttttttataaacatagtcaacatattcatgtttctttcaaacatttcaaaattaattttcaaacttttaaaaatctctatagtattgccattccttctggtgtcatgttatgtatgccatcattactcgtttccgttttaaatggtattttagcttcaatttcacaaagtgctgttgctttctttggaatttactttaaactccagacattcatctatatgccttctaatggggtaattcaaggaatgcgtccaattattagttataactatggagctaaagagaaaaagcgaatggatgaaacgattaaaatggctggattatcaatcagtgtcattttattacttggaaccttattgttctttttcttccctcaaacaatcttaaaaatgtttaatgctaatcaagctatgttagatatcggaatcagtggtttacgtattttatccttagcctttattctttcaacaattgggattgtgatggctggtgtttttgaatcattaggaaaaggatcactttctttaatcatttccttattaagacaattcattattatcattccagcttctttattactaattccatttctaggacttaatggtgtttggttaaccttcccactttctgaaattatcgcttctcttgttgcctttattttatttataaaagtatataaagggattaatccaaaacaggattaatcccttatttgtttaacaaattgactactacgatgtaagatcaacaagttgagcaagccatcataaacgaggcatattccaatcatcattactgaaaccaaggcggcattaaatggattaacaacaataatcattcccaaaatcaacaataaaactgataacaccaaatcatataaccatctttcaaacccccattgacgtaattgaaaagacctcacaatattcaaaattccttcaaccacaataaacattccaattacaaaaggaatcatcataatcacaatatcacttcttaaaatcataaaaattcctactgcacacaacaaaaatccagtcaataaatcataaccaaaacgataagagaaatcatttgaaaaatatctaatcatatccatgattccacaaatcaaaatcactccagcaattccataacaaacaatcaaactggttgtatctggaaaaagaatcagaataattcccattattatggttataatagaatacataacaacacctttttttaatccttgtagtaaatctaacattttaccaccctctctttagttctattattatcccagcttattaacaatatatgaacacattcattgattttttttattttttgtatacaatagataaaaggcaggtgaagatatggacatacttatcgatacaatcaaagatacaatactcatcattcctattctttttgttatgtatctttgtttagaatattttgaacatcgacaaaccaatcaaagagtagaatattatttaactcactatggtcctctgattggtgctgtcttaggaattattccacaatgtggatttggagttttggctagtctcctttttattgaaggaaaaatgacattaggaagtttgattagtgtctttattgcaacaagtgatgaagctatccccattcttttaaccaatcctgagatgtatacatctttaattggtattatttttattaaatttatatttgctattattgtgggttatgcagttgattttctttttaagaatcaatcttttgaacattttcatacccatattgaacatactcatgaacattctattattattgaagccctttttagaacatttaagatttacgcttttatctttgccgtaaattttgttctgtcattggctatcgaaacgattggttcaacaactctttcttatctgcttcttgatcgttcgatggttcaaccaatcgtagctgcaatctttggctttattcctaattgtgcagcaagtgttattttaactcagctctacattagccaagttctcagctttgcatcattagttgctggtttaataaccaatgctggtttaggtttactcgtcttattacaaaacaaaatagatatgcgtatctttattagaatatgtatgattcttcttttaagtgctttgcttttgactttacctatacagtggttctatcttcactagatggaaccatttttgcataataaacttgtgatggtaaataaaacagccaaatcaaaggtatattgatttgtaatataaattgtaaagcaacacaaatatcacataacgccaacaatatcaaagtcactcttaaaaaatgatgttttttgattgctgttattatatttacaagactcattaaagcatagacaaacgctaataaatagatatttggatataaaaaacctaataaacccaaatagaaaagataatcattcgctagctgacgatgataaagacattgcacaagcataaacaaggcaatccctaacttataataatcaccccacaacaaaatataatccgctaacaaaatcagaaaaaacacatgatatcctctttgtttatacaaacaatagaaaaaacaaacaacaatactgaaatatttaatccaactcaattgacttattacaataagaaaataaagaaaaccttcaataatcagaaacatatctttatttttccctattttttataatttatgaaaaataggttgcattttttcaaaagtacaaaactccttaaatccaattttctttagttcttctttaacataagctatctgatagccaacatgcccttcttcatgagtatcagaaccaatcgttattattttccctcccaactcataataccattttaaaatcgttcttgaaggcgttaaatcattcaagccatatcgaaaacatgatgtattgacttcaatccctttaccatgctcaattgcatattttaaaatatcaacaatgatatctttcatcaactcatcaggataaacacccaattgatcatacctttttatcatatccaaatgacctaaaacactataatcatcaaatgccttcatcacatcataaatcgcctgataataaccacgattatacatctcttgactcttatccttttgatattgataagtccaaaattcaatatcatcaatctgatgatttgataaaataataaaatcaaaaggatactctttaaaatcattttgataatctttgattgtatgtttttgaaccccaaattcacaaccaaatttaattgttaattgatccttatacacttcctttaactgtaaatatctttgataatatttctcataatcaacaacataatctcccatcgtcccataatcactatgctcagttatacaaatctcatccaaccccaactcaatagattttaaaatcaaatcttccatatgatatttcgaatcattgcttaaacttgtgtgcatatgataatctgctaacattgtcatcacctcatcattagtatacatcttttccaatatcaaaaaaaattataatcaaattatgaaaataaaatttcatttctatctttttgtattataatagttttaacaaaacaaaggaggaatttttcatgttaacaattggatttattggtaatggaaaaagtgcaaatagatatcatatgccttttatcctacaaagacctgataaaataaaagtaaaaaaaatttacactcgtcatcacgcaacagacaaatgggacgaagttcctggagtcatttatactgaaagcttagatgatttattaaacgatgaagatattcaagttgtagtgatttcaaccccttccgctttccattatgattatgctaaaaaagttttgaatgcaaataaacattgtgttgttgaaaaacctttcgcagatacatatgaacaagccaaagaaatctttgatttagctaaagaaaaagggttgattgtagagtgttatcagaatagaagatttgatagtgatttcttaactgttcaaaaagttatcgaatctggtaaacttggtgacttattagaacttgaaatgcattttgattactatcgtcctgaagttcctgaatctgttcatgagttcagtaccatcaactcgtatctctatggtcatggttgtcatacacttgatcaagtcatttcttactttggtaaacctgatgatattcattatgatgtaagacaactcttaggtgaaggtcgaatgaatgattactttgatttagacttatactatggaacattaaaagtatctgttaaatcaagttattttagaattaaagaaagaccaagctttgtcgtttatggtaaaaaggggatgtttgtcaaagcaaagaaagataaacaggaagaacacttaaaattattctatatgcctacacatgatgattttggagtagacttaccaagtgaatatggaacattaacttactatgatgatgaaggacattatcatgaagaaaaagttatttctgtcaatggagattatggtcgttattatgacgcgttatatgaaacaattatcaatcatgctaaaccattagtaacaccagaacaaactttattacaaattgaaatcctagaaaaagggattcaaggattaaaataaaacaatgagcatggagctcattgttttttctatacaacttcctttgacaattggatagttttcaattccgtgcgtactcgtttcatatctaataaaaaaactaaataggaaataccagaaatctctttaatcgaaaataaaatcgtaaaaaatatattacattcattgtaatataatagctacatccaacaaattaaacagataaattgatgaccttaataatttcttttatctcatcactccatcccctactcttattattaagaatacattttacaaaaaaacaagcaaagctatctaaatgaaaaggacgttttcacgtccattttcaaattatttttatagctataaagaaaacttcgaatcaatataaagatgagttgaatcatcgactgcataagatgcaacaagccatttactcgctagaaactcattaatgatactaaggagatcattctcatcatacttctttccgtttctttgtagtcgcaaaccacaagaggcacaaccggcaattgtatgtaaagaatattcaattccctgttgtttgaaaaattgattgatttgttcaaccatcataacatctaccatacttttcataatttatcacccattaagagtataccaactcttttagataaatcctagtcaaataatgttttaatgaatatctcttagtgacaaaccaacttctaagcctcttttaaattgaacaaaaccatattcaaaataaaattcattaaatttatcttctaattcatataattcattctctgacaaaacaactttttcattttctttacgttcatgaaattcttccatcatatttaaataagaatcatccacctcggctaacatttctgcttccatatcagctaaaataatatctgatgtataaatctcacgaataatatctgatgtataaatctcacgaataatatcttcttgattcatctttcattcctccctcatttttattataacaagatatcaaataatttgctataagaaaatataattaagggcgataactttcaataaaccagcgatttctttcataaaataaatttcttatctttccatcaatcatgcattcatataagagcccacatcctccaacctgtgaacttgcttttcgaatatcaagaattttatcaatccgaaaactctctttgccctcacgactttcccaaatcatataaagtggtttaagtttgccttctttatttgtcatcacaatcatatctacataacgtttatataatctcacaatgatttaaaccacccttcaggatgaataacatgatcttctttaggattaaagtttgtcaattctctatgaatttccatacaacagcgcttaattttttcaaagccaaatttatttctaatttcatcaatatctctatcaattttcttttccttttgacgttgattttcatcaacaaaaagacttaattgaacatgagaagaatcatcagctaattgacttacacaaacacttacacttcgatagggacgatctaaatacccataacaagaccctaaacaattttccagtaaaagttgttcaacaaccagcataatttcactagaaatattcgttgctatatcaatcttcttttgccttgtataactgttcaattcattatcacgtaaatgaatcgatatcactgaacctttaagatttctgtcctttaaacgtgatgccactgattctaccaaaactctaaaaacatctttagcttcttcaaaagtagaaagatcatgcatagcagttattccatttcctattgattttggcattctttcattatcagataatgcaacctcactcacatccatcccattggcaaaataccaaatcatttcaccattttttcctaaaaatgatttcaaatattctttatgacttcttgcaatatcaccaattgtataaattcctttatcttttaatttattggttgtagccttaccaacataaaacaaatcttccactggcaaaggataaacaacatctttaaaattctttttagaaatcactgtaaagcccatttttttatcaaaatcactacccaatttagcaaatattttattatagcttactcccattgaaacagataatcctaattcatgataaacacgcatttgaatttctttagcaatcgcaatcggatcacctccaaataatctttgtgacgatgttaaatcaatccaagcttcatcaatcccaaaactttcaaccttatctgtatattcacgataaatatttttaacttcttcactataatacttataatcttcataatgtggttgaatcactaatagatgcggacatttttcataagcctcacgtaatgattcacccgtttgaatatgaaattctttagctaagtcattcttagccaaaacaattccatgacgtgacttttcatttccaccaacaaccattggtacctttctcaattctggatacaacatttcctcaatttgtgcataacaatgatttaaatctgcatgaacaataactctatcccacatatgcctcactccttgcttctattataacgagtgatgttgcaaatttcaatagtttatgcaacttattttttatttttttaaaaatactttatttttgttgtatgattagttataatatgcataaggagggattttatggaactcaaagacattattaaagattataaatatcgtcatcaattaacaaatgatgaaattgccaaaaaattaggtgttacaaaatcaactgttggtcgttggatttcaggtgatgtaaagcgaatccaagatgaaaccttacaacgtctaaatgaaatattaggttatgatgttgaacctatcattaaaggctcatcagttcatttaaaacgtcctattcttggctatgcaaaagccggttataatatgtttgcccaagaaaactatatgggcgaagaagaaattactgaggaggatttttataaaggtgattactttttagaaattcaaggtgattctatgactggttcaggaatcatggatggtgatttagctttgattaagcaatgtcaaagtgttgcttctggagagattgctgtagtaatgattggtgatgatgaagttacagttaaaaaaatcattaaaaaacctgatatgttgattttagaagcaaccaatccacaggttgaaaatcgttattttactaaagaagaagttgaatatttacctgttcgtattattggaaaagtcgtttatacaaaaacatatttttaaaaaagtggtttagattgtatctaaaaccacttttttaatcaaaataagtttgccatagaggattatgatatgcctcaaaacacatttgaatctgttcaaagttattgcgatcaagggaaagttctggtaaatgttctaaatcaaaataatcagctgccacagtttctaaattttttgtaaatgtacctgatatcttttcacataaaacaaaaactttaataatcttatagagataacgtggtaaattatgtttatcacgatcttcaatcgcaataattcttgtcgctttgacatccaatcctgattcttcctttgcttccttttctgtgttttctttaatagatgtatcaatatcaacccaaccaccaggtaatgcccataatcctttcggatcttgaacaagcaaaatctttccttcatcattaaaaatggcagcccttgtatctaattttggggtttgataaccaacctcatgacaaaagacatcttgaatatgatgaacaggttgatttaaatacaaagccattagttcagcactgatttctctaattcgttcatatctttctttatcatacgcatcatgaccataatatagcccactctgcgctaaactttgaagctcaataatataatcaaaaagctcttttttcaccatcatcttctcctattttttatctaattgatgaatcaaacaaactgaagattcatcttcatcaaatcccatcttataataaaaaccatgacttaattttcctctttttgtgaccaaacaaatacgttcaatatgttcattcaaacaaatttcttttagcttgtccatcaaagcagaacctatgctttttccctgataagttggatcaacacatatttcatcaatccataattcataactctctaaataagtcatctttcttgaaaaaataaaaccaaccaatctttgttcaacaaaaattccaagatgtaaccccatctttgtctccatataatctatcaaacgattatatgcctgctgttttgtccattcttcattccaaggcgcttgtaaaaatgctgcttgaaaaataacaacagcatcatttaaatccgctttatctaaccttttaaacacataatccattaaaattcctcaaattccaataacatatcattccattttgctccaccatgacaagaggcagatactccttgatgaacaaaaccaaatttttgataataatgaattaaatgatctttacatgttaaaaccattccttttttatgacgcttcttggctaaatctataaaagcattaagcaaagcagcagccactccttgtctttgatattgaggcaaaacatctaaaccaaagacggtttgataagcaccatctttttgatgtaatgatgaatcatgatacaattcatcaggtaaacaaggttgattggttgtacaaccattaataaaaccaataatttgatgatcttgacaagcaactaaaaaacattctttaaaactttgatatcttgctaaaaattcttgataagttgcagcttcttctttaggaaaacaagccttttcaatcatcgcaatttcttctatatctttttcattcacttctcttatttccataaatcatactcctttgccttttattctaccataaataaaagaaggcttcattagccttcttccattttatttaaaaacttttcaataaattcttcttcactcactgctttagatacataatatccttgtcctaaaggacattttaatcttgtgagtaactctaaatcttgttttgtctctacaccctcacaaatcactttcatatttaaagcctttgctatatcaataatcaacccaataatctttactttcttttcatcttgttttaataaaaagacacgatcaatctttaaaacatccacactcatagtatttaataaattcaaagaagaataaccacttccaaaatcatccatggaaacaacaaaaccatcatttcttaatctcatcaacatattcaatatagttgaagataaatcattaaaagcactttcagtaatttctatctctaaacatttcactggaatctgataacgctcaataatccctttaaaacgttcataaaagtctttatgatgaattgtcactcttgaaaaattcacagcaataataaaatgatataattgatgttcatgaataaattgacaagcttgttctagaattgaaaaatctaaatcataaataaaaccattactttcaaataaaggaataaattcatctggataaagaatctttccatcactcatatgccatctcaccagtgcttcagctccaacaatctctaatgaaggaattttaaatttaggctgtaaaaacatttgaaattctccatcaattaaagcacgatgcatctgattaataatcagtccctcttgataaatcttatccaaaagattttgatcataccaaacaatatttccttttcctcttgtttttgcatttttatgagccaataaagcattctccatcatatcttgaattgaaatatctttttgaatacgataagctccaaaagtgaacgtaatatcatcactaatatcaaattcaatttcattttttattgattgaataatacatgtttttaaatcatgaatcacatttttatgatactgggtaaacacaaagaaacaatcattactatttcttgcacacgaccccctaccatcaacaaactcacgcaatgctttagcaatcgcaattaacatctgatttccaaacaaataaccatatgttgcatttaaatatttaaaatcatctaaatcaaaataaatcaagactgattcagtcatagcactttcactatgtttttgaacttcaatttcaaaagctgctccattatataatcccgttaatttatccgtatacatgacttgttgaatttgtttttgtttataacgataccaaaaagcaaaaacaccacctgtaattattaagtaaataaaaaacattgctattgaattaaaaagatgttgatctgaaactgattgagctgttgccaccattttatcagcttgagtaaaaaaatcttgtgataaagtatagagttcatcacgtgcttgttgctgatctaaatgattgattttatctttcatcaaatgccatgtcacttgcatatcatctaattgtttttgataagaatcatcatcaatacgaataagaccgtattctccctctccagtttgtaattcatgcaaaatattatctaattttaaaataagttgttcatcatgttctccgtttaattcttctttaacagctaactgtgctcctcctcttacaattccactataattaataacttttgaataccccatattttgaaatagtgaaaaaataagaatgacaattgccacaatccaaatacacgtataaacactcatgctttgcttttgcttcataaaaaattcctcaatcattcttttatattctatagatattttacatctttttgttcataaagtataggtatttcgccatttgtaaaataaaaagtgaagatttttaaatatcttcactacatttgattttgtgacattgttaagacaattccagccgtatcttctaatctttgttttgccactttaatattttcaaattcttcatcactacatgtttcaaaatcaaccttctttgttaactttttaaaacttgaaagctcatctttgatttgtgatttaacagttttttctaattgtttaccattttgcgataaagccccttcaacttgcataattaaactttctacttcatttttgaaaaccaatctttcttttaataaagcatcctgactagcaaattgttgagcctcatgaattgctctttcaatatcatcatcagacatatgcgaaccattttcaattgtaatactttgcatattaccacttgctaaatctttagctgaaacactgacaattccattggcatcaatatcaaaagttacttcaatttgaggaactccacgcatagcacgtttgatcttctttaatttgaattttcctaagctcttattatcttttgctaaaggtctttcaccttgtaagacattgatttctacttgtgtttgaaaattcgaagatgtcgtaaagatttgactatgacttgtcggaatcgttgtattacgatcaatcaacggtgtagcaactcctcccactgtttcaattgataaggttaaaggtgttacatccaacaacaaaacatcataacttcccattgctgaaacatcaccagaaagctttcctccttgaatccctgcacccattgcaacacattcatcaggattcaatgatttacttggaataattcctgtcacttctttaatcttttcttgaactgcaggaatacgtgatgaacctcctactaagatgattttatctaattcagctggtaataaacgagcatcatttaaagcattttgcattggtaagattgtttgttcaacaagtttttgtgttaaacgattaaatagttctcttgtgattgtcatttcaagattaattggaccagctgaagatgttgcgataaatggtaatgagacaattgttgatgtcattgatgaaagttcaatcttggctttttcagctgcttcattaatacgttgtttagccattaaatcattggataaatcaacttgatacattcttttgatttcacttaaaatatattgagctaaacattcattaaagtcatctccacctaaatgattatctcctgatgttgataaaacttcaattaccccattaccaatttcaataatcgaaacatcaaatgttcccccacctaaatcaaaaaccatgattttttgaccataactattttctaatccataagccaaagctgcagcagttggttcgttaataattcttaacacttcaagtccagcaattcttccagcatcttttgttgcttgacgttgtgcatcattaaaataagctggtaccgtaataactgcttgttttacttcttcacctaaataattttgtgcatcaatctttaatttctgtaagatcattgccgataactcttgaggggtgtaatctttttgattgattctttttgtataatttgttcccattacacgcttaatagaagcaatggtttgcgttggatttgtaactgcttgacgtcttgcactctcaccaactaatcgttgtccatcttttgtaaaagcaatcacactaggtgttgtctttgctccttcactattagggataattgttgttttcccattttcaataaaagccatacagctatttgttgttcctaaatcaataccaataattttactcatctttcttctcctttattaacatctacaacaacaagacataaataattgcaacatcataaagctatagcaacaattgattgccgaataaggtgaaccatagctttgttgagttgaacgatactgaccagatccagcctgtaattgttgaactaaaaatatatattgaatatttcctggttccatttgcgcagctgtttgagcatattctaaagctgtaacattgtttccaatcccattcattgctagtgcgctatagtaaaaccaaattgaatttcttgtacgaatttgttctaagacatttaaagcatcctggaaacgtccagcattgatataagccgcagcatcattaaaagctgcttgttcatttccattatattgataagtcgattgactttgaccttgtcccccaaaattctgctgagtaaagcctttctttcgactatccataattgttttataagcattttgtacttgtttaaatttttcagtatattctgcttgatgttcactattaatattcgcatcaggatgatattttttacttaatgtacgataagcttgtttaacttcgtcatctgatgcactaggagaaacccccaatatttgatatggatccattatttcttatcctccgatcttttcatcttacgtagttcatatttactccaaacaccactataaaggatattgcgcaaaatttcaacattctctgtaataggcaggcattcaaaagcatttgcacttctcgcaatcatcatctctaataaggcatgacacctttcatcaaaatccggttgctgataatccttaataaaaggattaaatgtcttttttttgatatcttcctcaatatcatcatacgcatcgagtaaataaataaactttcctaaataaaatcccatttcatagagatcatcatagaaaatatcatcttgataagtacatatctcccccatgactctcccaaaacaaccagctaaatcatcaatatgatcataattttctttttcatatgcattgattttctgtaaattttcctcaataacctttattttctttggatattcttccttaatctttaaataagaagatgaaatcattttcttataaatctgtttaactggctttctttcatccatccaatcatcctgacatttataataagccaaaacaatcgtcatctttgccgcataatcaatacaatcatttagcaatttatcatgcttcttcattggatgaatcacacatcgctcatgtaccttttttgtgggtacgtcataaagcaaagataataacatagctaaaaaagtcatatcaaagtttaacgatacctgtgccttaagaccatattgatttcttaatgtctgacacagaccacaataatatgactgatatatatcgaattctttaaattttaattctggtttatttacaacaatatatccaaacatttttcttcctcttttatatgttaacatcatcagtatagacaaaggatgttaactattcatgaacttctatttgatttgatgggtttcttgatatttttttatagctaatattctttgtgataaggttggatgagaataacacattttaacaacaataggatgcggttgaatattagacaatccatcttttgtcagtttctttaaaacatcaatcaatgcatcaccatatccttccttagcagcaaaagcatctgcctgatattcatataaacgtgaataatgattaatcatcatatccaaaacaatcatcagtggttctaatacccatcctaaaaccgcaacaaccatataataattcaattgcttaatatgaaaagttgcatataaacttggatgaacaaaaataaaaataaaacatagaaataaaatcaaacccatcaaaacattaagaaatctttgacgttcagcatgttttaacagtgcatgtccttgttcatgggcaaagactgcaacaatttcttcttcactatacatttctaacatattatcatcaatacaaatttctttttccttgccctgcccactgcaaaaagcattcgctcgttttgtacgttttgaagcatccatgacataaataccctttaattttaaaccatgcttatttaataaagcaacgattgtatctttaagatgtccttctggtaatggtgtaaactgattaaacaaacgcattaaaaagatcggatgtctttgaatccatccaacaataagccctaaaacaacaaagataacaataaaaccatctataaacatagtgaacaaaaacaaataataaaccaaacaatccaaaatccaataacaaagataccataaaatctttaataaaggttttctttgtggtcgtattcattccatacttttcttcaatcacaaaagtctcataataatcaaaaataacttcaactatttcttcaaaaccattaaaaaccaataacattcctaatgaactaattaaaatagacgaagaaaaaagcattgaaacttgataaaatataggcgtaaaaaaataaaaaatagcaatacctatatctaccaaatcctgaataatagcaatcttatctgtttcattttcataggcttgccatttttgatatgtggttgaatcataaatatctttaacttcatcacttaaagcacattgacgttgttgttgattaaaataaatcattatcattttaaaaacaacacccataacaaaacacacaaaaaatatccatctcattcatccatcgctccattcattttcttattatatcatgaaacaagaaaagataaaaaagaaactatttttttgcatttttataaaagtttattttttgttgtaatttttgaatacttaaactatcaaattctgcttgttgataatagataactaaatgatgtgataaagcataagtatgattgaaactagtataagaacaatcactacgataaggtataagataagccttaatgatgcctatataaatgataaaaacataaccattatcttcaccacaatcttgataatattgttttatttgtgaaaatgaataatgacgatgttcttgaaaatcgcttgctaaacgataataatcacgttttgcatgttgatatatttttagtttttgtgatggtttcatatatttattatgataatcatcacaaaaatctaaacaaaaaagttccctttatgagaacttctatcttttatttaaaaaacgttgagctattaattctaagacaaccccaatgataaaaaatacaataacaccaatggctatttttagataaaaaatcatttgcgcatgttctttttgccatgtattatcaagagaatagaaaacatattttgtagaaacattatagtcttttgcatactttgataatttggttttcgcagtttggctcattcctttcttttgtcctaaaggtaattgaacttgttgaccacttgctatttcactagcaagcgaacgattcatttgggcaaaaatatgatgaccatctggtagttcaataatatagtaaggaagatacccaaaatcataatcaattggacttgttttaacagtcgctttttgacgccatgatgtgccattacgtcttttggtataataatcttcccaaggagccaatgtataaacattcgttttttgaatactttttggcgtaactgtgacataatcaatattatttaaaaccttatcccacattgttattgtttttaatgaaacaatatcttttcctgctggttttcccgtataatctgttgttttatttttatcaatttgactttgcgttattgcagcttgtttgttttttgaccataaataggcttcaacatctccttttaaataagcaaaaacaccacaaaaaatagagaccaaagcaatgatgacatgaatcatcttttttaccataaattttcacaacccctttttatattttctacaacttctttatcgttttttataagttcatgtttattgattccatcaggaacaaagcgaaaaacagtaaattcaacctcttgatcactttgattagcaaaagtatgaatagattgttgaacacgaatgatttccttttctttaaaaactttcttttttcttatatcatcttccacccaatagcaagtcaagttaccttttgtcaccataatcacttcttctattttagaatgaaaatgccattgttgtgaggtatgtggagcaatgctattataatggatttcaaattcatcaaaaataaaataatgcactttggtcccatcttttttatccacatatattgcatcatctaaataataatattccatatttccccttcattttttaaaataggcattgttggatgcctattttaaaagtaaatctttctttttcaagattgcttcagcagcttgacaagctgaacaatcacaataaagtgcacctttggccttgatttcttgagcatgagttgaaatatcttgagccattttttcaccaaagcatgcctttccagcatccgacatagcaaaaccaatcaaatcatcaattggcatgatatcttcttctaattcttttaaaagtgcctgagcttttactttttcttctgtcgtacctagtgcctctttccatgcaagtgcggcatcttttgcttcttgacaacatgatgaagcatccaacaatgcttgaacatcctttaaaacttcattaagttcatttttttccatatgactgaccttctttctttattccattatacacttattttcataagaaaaaaagaaactttaatttccttaacatcattgaattcctcaaaaagcagttttatatctgtctcatgagttattgtaacaaataatcaatgaaattaaattttaatttttctttaataaatgtccaatcaaatctcctacaaaacttattccaccataaataaatgtatatatcaatgcactttcattataaaataaaaagattgttggtaaaaataagcaacctacaacaaacggaaatatgatccatcgagtttgtttgtagccatacagcaatgaaacaataaatgtaatcaaaggaataagacataataaagcaatcattgccagtattgtctcttttataaataatggtaaaccataaaaaacaagtattaatattaacatatagggaatcatctttttcatatatctgctccttaaatattgataatcttattttatcataattattttactgataatagaaaaagaaggattttcaccttctttaagcaataaatataactacaactgcataaacaattaaagtaataatcatgttcaatgaaataaatgctgaagtaaagttagcatcctcatcactcttatacaatggagaaatttgcataggtaaagcaaatcctgttggacacataaaatagataagaacagccattaaatatgtcttttctgccataagatgagggaataaaataaagaatccagcaatgaccacaatataaaagataactctcacaactaacaattttaatattgatccaattgttgctaaattaatctttaaattatatccaataacaaataagatcattcccataattggtgctgttgctgttgagacagtatttgtataaacatcaatcaaagcactttgagataacatatcataaacacctgttaaattaagaattaatcctaacataactgcaattacaaatgaattggtaaaaatggttttcattaattctttaaatgttgtttctccagcactcttttgagcaactaaaatcggaatcacaacaaatgctattaatgttcctgctaaatcaaagataactgtattgcttgcataagcaaccccaacaatagatgtatagagaggtaatgcaacatttccaccttcacatgtcgttaacatgaaatgtgaaatatgcgaaaaatgttgacctgtaaattttcctaacaattttccaataaccatagctaatgaaaatgcaataaatacataaaccacaatgaatattgctgatgattcaatttttgatgttaataagatattaaaaattaatattggaaataagacattgaaaacgattgtattagccccttctttttgttctggcgtaataaatcctttaattcttgaaatcaaacctaataagactataaataaaacaggaaataatgttgataatgctgtcataaatttctcccccttgacttttacatctcttattttattcatatctataaatatttcaaatacctattattcatagtttattataccttcaaagcataataaaaccccttggcttattgccttaggggttttttcattattctatcttcatcattggaacatctaattgaataattttttcaaattcatcaaccggaacaggtttagagaaaacatatccttgaatcatatcacattccatacttcttaataattcaacttgaggaattgtttcaattccttcagcaatggtttccattcctaatttctttgctaaacgaataaccgattcaacaatatcatttgctctttgattattttctttaccaaagaaaaccttatctaattttaaaatatctactggtatttcttttaaaacatttaatgaagaataaccacttccaaaatcatccattgaacatttataaccacaattatgtatttcattaataatatgacgtaagatttcaagattttcaaaaaccactgtttctgttaattcaatttcaattaattcagaaggaatctgatattttgattgaatatttttataatcctttaagaaatctgaattttgtaaatgatttctcgataagttaactgaaataggtaaaacatctttgccttcatcaatccattttcttaagatttgacatactttttcaaaaacatacatatctaatttaacaataaagttattcttttcaaagaaaggaataaaatcattaggaggtattaatccatttattggattatcccatctgactaaagcttcagagccgataacttttcccgtctttaaacttacttttggctgtaagtaaacaataaactgttcttcttctaaagctttttccatcatgttttccatgtctttttctttcatcatcttttgatgttcaatatcattataataagcattagaacataagtaataactattgatatcttttgcattcttacgtgcaatattggctttatccctaatagaaaccaaatctaaagagctatctgagacaatataactaccacaagtaattggtaaaaaatatggtacattcttttgaatatcaaaaccattaatatcatcagatattttatttaaacgttcttcaataacatcaggatcagttgtttttaaaataatattaaaattatctgcattaattctcgcaacaaattcatcatctttaatattttctaaaatacattcatgaatatgtttaagcactttatttcctaattgactcccaaaagaatcattaatcaatttaaacttacgtaaatctaaagaaacaaaagtaaaaggtttaaaatcttttaaaatcttacgacactctaaatcaaaacgaatttgcgtatatccacccgtaattgaatctttataagcaatatctgtaatttcctgatttttcttagatgtaattcttaaaataataaagacaactactaaaaataagagaacaacacagattgtcaacgacaataatgcataatacatatatccagtaatattttgagaatgtgcatccgttggaacaattgaaagcaaataccaatctcctttggcaagtggagtataagttaaagagcgtgattctttgtttttaacattaaattcaataattccactcttaccatctttaatatcttgaatcattttatccaaagaataacctttttccataacagatacttctttaaatgttttaaaaaagttatcaccaccaattaatgcattggtattattagaatgcaagataaaatctccatcttttgaaataatatgagaaaagccacttcctgaaaacgtatctgtatttaacaataatttcattgttgatggtggtatccaacctgctactgccataatatcagcatcatttgcgcgaaatggaattgtatataaagctccacctacatcactatataccttaacaagtttattactgacaccactttcaccatgaaggcattttttatgacatctactttgctcatatcttttttccctaagccatcaacatccaaaacaccatctttattaataaaaccaatccattcaaaagcactattatcaacagtatcaaaaattaagttttgatattggtttttatcaatatgatttaaatgttgcgctaaaattgttagttgatcaatattatgattcactctttgattcactttatatgatgtttgttgagacgtttcagttaaatagttttgaacttcggtatctataacttcatgtcctttttgagtaattgtccaagacaatactgcaacaataataaaaatcagaccaaacaatcctaaaacaagatttctttgttttttttcaataaataatattcttttcattttgtccccttatatagcttatatttttcacattggtattgtaacatggtttacaaaatattacattgtttttatcattttttaaaacagttttatgacttttaccacaaaaaaagagaatatcgtgaaaaatcactctattctctgtctcatttgttgttttgccccctcaaacatagcttcaagattgagcaaaccactggtttttattgtattttttaattgtggaagctttgtcacattatctaaaataatatttttaatggctagaggtgacaatgatggaaagtatgattttaataaagccgctgctccagccacatgtggtgctgccattgatgttccatttaatggtgaataacctccttgtaaatccaaacttaagatacttgttccaggcgcagcaatatcaacactctttagcccataattagaaaaacctgctaattcatttgaaggtgaaatggcggcaacggaaataatatttgcactttcataagttgctggataaattggataaatatcattgttttctccattatttcctgctgaagcaataaacaaaccatcatattgattaattgcttgctttaaagctaaagaataaacccgtccaccccaacttgcgtttaaaataggaatatgaaaaacatttgcaaaatcaatcgccgcaatagctgaggcaacatccaatccaaacttcatggatacaacctttacattccaacagactccagtaattccaatataattattaccgactgctccaactgtacctgcaacatgcgttccatgtccgtccacatccattgaaaactgattatcatcagcaaaattccacccattaacaatccttccttgtggagattgccacatattccttctaatatcaggatggctgtcatctatcccggtatcaataataccaacaacaacttcttgacttcccgttgtataattccaagcaagtggcgctttaatcttttgaataccccaaagctgactataaagtgggtcattagcattcaaatgcttgttttctatataatcggcttcaacataatcaatatcaggatacatagctatcttttcaatcgcatcaaaaactgccggtggatgtttatctttcaatctaacaagaaaaatatctccttcatcattttgcgaatgaaaaatcaattcaacgttctcatattcaatatcctgtaaaactacatctaagctttcatatagcttttgttttgaattcatcttctgacgaaaagccataataacctttcctggctcgtattcgttattcataatacctcctcattcatctaatgacactctttttcttgtaaaattgcttgaagtttactatagagtacattttctaaaagcatcacttgtgtaattgtttgattgaccgattgatcaatctttaataaatcacaaacatcagttgctatatcaattgccttttggattttttcaccttctgcattgataatatgtgataaggctgtttcttgtaaagcaatggattcaagtatgtcacatactcttttttcaacacaaggaatcatgcaacaattttctttacaacatgaacatggttctatacaaataatacatcttaaaagacataatcgacaatttttaatggctaagataagaaattctaaagtttgctgatcacaatgagatgttaaaacaatatcaataatcttataatcacaaggaatacagaattgtttaataagacatccatcttggtggaataaataaagacattgctgatctttatgccaaacaatgacaatataatataacccaaaatctaaaaagcaatgataactctcttgattaagattttgacttaacaaaaagacttccccattatcattcatttctatcatttgattatcaaagacaataatcaatgcatcatgattttcactataagtgatattcattatcttagcataaggttctttatattcactaatacaaaaataattcatttcttctaattgatgatttaattgataaatatattctgattgattcatatcaacagcataaaaacaatcttttttcttattataacaaatcaattgataaggtctattcatatgatattctttcacgaactgaaattgttcatccagcattacaatggcattttctttaggatttgttaaataaaaagattgaccatcaaaagtcatattttgataaagagaatgtctttgtttaggtaaatcatttatgagttctaattgaagctcatccattttcgcacctcctcttttattcatatcactttatcatatgttttttgataaaaagtgtgttctggttatattccttacacatcatttttaaataaacatactatattttgaagaatcatgagatatcaattcattattcttttaataagaatgggaggtgatttaaatgggaatgccagtcattacgccaggaaatggcacaagagaacaagccattaccgatttaattgaatctgttgctttacaagaagcagctttgtcacatattttaaatgctgaaggagaaaagattcaagctgttgtcgcaatggaaaatgtcacgcctgaagaattactaatggttaatcaatcagttgaaaatatgaccaatacaattgctcgtttagagatactcttgcaatcaaaattagaactctttgatttcaataattcaccaattatttcttctacttctcaagcttattcttcaataatcacatgattttttttattcaattcataaaaggaggtgaaaaatatggccaatataactggtagagttgtttttgatcgtgatcgaagtgcatcaatcacatcaggtgatagtggtattgctaatgtgtctatagttttacaaaatataacaacatctttaaggttgacggttcttactgatagtaatggaaattatacttttaccaatgttcctaatggacaatatcgcattgttgaatcttatggtacacctggtgtggcaacccctggaaattttaataatgcaactattggacctataccagaaggaatcaatccaccaatttctactgttaacaatccaccaacaggctcaaccaatttagattcattaagtcctgatacactctttgttacagtcaatgatactgacataacaaatcaaaatttcttaaatgggccagtcatctataccccaatcgaagatatattagatccttgtgccatcactactgatgaaaacttaattactgatgccgataatggcacatttggctttttcccagctggtactccacctaatacaggggcaccagtggaaccataccccgaagtcactccagatttcacttatgttttaccaaattcagatgtttttactccattagatggtgaatataccgttcaaaatatcatgactaattcgatgagcacgaatattggtgcctggtggcgtattgcggatcatacagttggtaacgagacgggtcgtatgatgattgtcaatgggttcaatcctggggcaatattctttaaaagtgttgtcaatgttcaaccaaataccaattatttattttctgcctggattttaaatcttttcaaagttcctggttatccaaatccagaactcggtgtagttattttagatcaaaataacaatgttatttatcaagcaacattaggtgctttaatccctgttaataccaatgctcctgaatggaaagaaattggaacagtcattaattctttaaacaatacaaccttaactgtagaatttttaagtgaaggtcctgaagtcattggaaatgactatgcgattgatgatatttcattaactgaaattcttgttcctgaatttacccctgttaaaactgtcaatcgttccattgttgatgtaggtgaaacagttcaatatagtgttacattaaccaatacgtgtacaagtccactaactgatttatttttccaagatactattcctaatggtttatcctttgttttaggaagtgttttgattaatcaagtttcatttgctgatgcgaatccaaatattggttttgctttaccggatgttcaaggtggtgaaagtgtaactgtcacatttgaagcaagagctgattttattccctctgttaatccaacaatcaatactgcgcatatccgctatgcctatactccagttattggaggtattcctggtatttatgatatcacaaccaatgaagttgctgtgactattcaatcattggctgatttagccattcaaaaaactgcatttcctaatcctgttgaaccaggaactgatataacttttgaaataaatatcacaaattcaggtccttcttcagccgaaaatgttatcctaaccgatgctattccaccatttttaacccaagtacaatattcaattgatggtgggacaacattctttccatggattggtactttaaatctaggaacactctttaatcaacaaacaagaactattctcattcgagcgactattccagaaactataacttcaccatttatcaatactgcaagtgtaacttcatcaactccagatcctaatcctaataataacactgataccatcatcatttttattttaacgcctagatgtcaagcatttactgacgttattcaatctgtcgctatgcaagaaactgccctatcgcatattttaaatgccgaaggagaaaaaattcaaagatttgttaatatggaaaatataagttcaaatcaaatgttgacattaaatcaatctgttcaatcacttgtcaattcaataacaagattagaatcaatattacaagctaaacttcaaaaagtatcttcaaccaactgttaaaaaccggataagttttcttatccagttttttgataaaattatcaaagctttattcctactttatctaaatttttttcttaatgttctttcaattgaatataataaaaaaattaattgtaataaacaaataacaaggctaatctactagcccctaagcagattttcatgtatctttatttttcattgacatttccgtttgatttccaaaaagtatatgcctatttttagatgactgcatataaaaatagtaaccacatataatcatcattatacataagtcccatttcttacttctcataatttaaaaaaaacatcaaagtcaattatcaattgaattgattaatatcatcttacggttgcccaaaacttttaacaattaaataaactcctattaatatatcaccaattcctattcccttaagtaatcctgaaaaaaatcagtaagaaccctgcttttaagaaaataagaaacaattatcatcaagatacccataatcattaacaaaaaaccatataataaaattttttattgttctagatgttgaatccttttcaaaaaatcaactgataaagcttgattatcatgtaattgctgatcatcgcatccattcattaactcagttatagttattcctagttcttgacacaaactttcgacaatactataagtcaggcatacattttgcattttcccattttgagacagttttataactaactcctagtctttctccaagcatcatctgagttaaattctttgcttttctttttttcgcaatatattctccaatcattttctgattcatgataaactcctcctttttatacccaaagtataactgaaatagttatgacatcatatcccctattaggcgaaaaaaggtgaaatcttctttttatcaaacaaatccactacttcttcttatttataaatgtcccaaatactactccaaaacaaagtcctaaacttatgcctaaagaaagattatcgaaaataattccatacactacccctatacataatcctattgatattcctaaacctctaaattgattatttggttctttcttgttattttgattcatttcactcactccatttcatcaatatttattagctaaaacatcttcaatatattgaaaaaaaggctttttattgacatcttgttgatgatgaatataccattgataagaatcttttaaaccttcttttaaagaaattgttgaagataataactctgattgttttttaacatcaagtttatattcataatgataaaaacaaaaataatttctttgttcaattttatcatagacatgaacaaattcaggttgttttcctacgacttcataacacaattcaacccaatctttaatagaaatcgtctctaaatttccaacattataaatatgttgtaatggccttttttcaataagtttatccatgaaatgacataaatcttccacatgaaaaaattgtaactgcatttgtccatctaaaggaagatagaatttttgattctttaaagcacaatcaaaaacaaaagcttcacgataaacattattcattggtccgtaaagatatggtggtcgtaaaatataagcatcaggaactctttctaataaagctttttctgcctcaatcttatttataccataatctttccaataataatttggacctaattttgtttcctctgtaaatggttgaggttcatcttgaggataaacggcacttgaacttacaaaaatatattgatcaaaactaccaagagcatcacataataaatgaatatccctagctctataagcacaaatatcaaaaataatatcaaaatggaaagcttttaaactatcacctatatgatttctatctttttcaatcagtttaaccttttgtgattgaggatgatgattccgattcaagacataaacattatagccttttttcacataatattcagcaacataacggctaacaaataccgtaccacccgtaaccaaaacatttttcattaaaataatctcctcttattatagatattctttgtttatcttttagctttctttattttaacataaatatcccgcttatacaaaaaatgacaatgtccaataagtccattgccatttatatcaattctttaaaaatcattttcgggtctttgacagttagatatgtgtataattcaaaaagcattgatagatgctttatttttttgtcaactttttattacttttatatcgtaattcatcgtaatatatgatataatggaattataagtattggaggctatattatgagagtgagtatcagtaaatcaaaaaactatgaatttatttatattatcaaagatatatattctaatggttcacgtacttcaaagacatacgaaaagttaggtaagatagatgacttatgtaaagaaaagaatatgtctcgtgatgaattgatcatttgggctaaacaatacgccaaagaacttactcaaaaagaaaaggatgataatcatgatactatcattgctttctcccctgatagaattattaagccaaacagtaatcgtaagtataattgcggttatctatttctgcaagatatttattacaagttaaaaatcaacaatatatgtagaaacattaaagcaagatataagttcaaatatgatttggatgcaatcttatcggatctaatctattctaggattctatgtcccagcagtaaacgatctagttatgaatttgcttctaccttattagaaaagcctaaatatgaattacatgatatttatcgtgcattatctattctttctaaggaaacagactatatacaatctgaactttacaggaatacaaattacattaagaagagagatggcagtaagctatattatgactgtacaaattattattttgaaattgaagaagatgatggatttagaatgtatggtaaaggcaaggaaaacagacctaatcctatcgtaggtatgggattaatgatggatggtgatggtatacccttggcttttgatttatatgaaggaaacaagaacgaacaagtcacattaaagccacttgaagaaagaatcgttaaggattttcaattaggtcaatttgtttactgcagtgacagcggtttagcgtcacaaacgaataaacaatttaatagtatacagaatagagcttatatcattacacaatctttaaaaaaattaaagaaagatgatcgtgaagtcgcacttagacatacgggatttttagaactgggaagtaagagttctaaaagaatcaatattgatgatattgaatttaattgtgaagataatctcaatagagtattctataaagaattgcctatagaatctcctatcaaggaacgattgattattacatattcacctaaatatgctatttatcaaaagaagattagagataagcaagtccaaagagcgatgaataagatacgttctaacggaaaattaaaaaaaggaacacgtaatcctaacgatccatccagatttatagaaaaaataacgactgatgaaaacggagtcgctgttgaagaatactatcatttaaatcaagagaagatagataatgaagcaatgtacgatggtttctatgcagtatctactaatctagaagatgatgatatccaagccattatcaatgtttcagaggaaagatggcaaatagaagaatgttttagaatcatgaaaactgattttaaggcaagaccagtacacttacaaaaacaagaaaggatagaagcacactttctaacgtgctttatgtcactcatcatctatcgcttattggctaatatattagacaataaatatacagctacagaaatattaaagacaattagagggatggaattggttgacacacagtataacggatatattccagcatacacaagaacacaattaaccgatgagctgcattataagtttggatttagaaccgattatgaaattacaagcaaaaagaaaatgagaaatattataaaaaatacaaagaaataataatttacgcatattcgttacagaaccaaaaagtcctgaaaccctttatacacattgggttcaggacttttattgcttataaattgtcaaagatgggattttaacataaatatcccgcttatacaaaaaatgacaatgtccaataagtccattgccatttatatcaattctttaaaaatcattttcaataactttaatatcttcttttaagatatcatatcttaatccattaaaaatcaacaaatagtatttatcattcattgtttcaaaaactacatcattattgatttctaattgatgtcctgtatcaaattgtatcccacctaatttatgtggtttcataaattctattttcattttaccacccctataacatcaccaagtataacacctttatcatatgaaaacaaccaaaataaatagatataatttgtttaaatttcgtcatatttttataaaaacgtataaaaaaatataaaagataaatactatatatgaggtgaaaaatatgtttaaatatgaaagtcgttatttacatccagtcaaagttgatcgtccaaatcccaattatgctatgttattacaagaacagttaggtgggcctcaaggtgaattaaaagctgctatgcaatattttgcacaaagttttcgtattcaagataaggaaatcagagatttgtttttagatattgcgactgaagaattatgtcacttagaaatgattgctcaattaattaatctattaaatggtaatcagcctaaagccaatgaagccactattggaagtgtcgaagctcatgttctcactggtcttaccccgatgcttgcaaatgcttctggatatttatggactgctgcctatgtcaatgaaacaggtgatctcgctgctgatattctttcagatattgcatctgaacaacgcgcaaaagttgtttatcaaaatctttatcgtcaaattgatgataatggtgtaagagaaactattgatttcttattaaatcgtgaagaagcacataacactatgtttagacaagcatttaataagattcaaaattctggttcacaaaaggattggggtgtcactaaggattcacgtatttattttgacttatctgatttagatggtcaaaactttgatcctaatgatgttccaccaagttttaatttagataaattttaaaggaatctcaacgattcctttttataaacgcattttttgaattgtcccatcattaaccactgctaagacatcaaattgatcattaacaacaacaatatcaccatcataccctacttctattttccctttatttaaaccatacatctgtgcgggattaacagcgaccatttgaacaacatcttccatagaacatccacaaatttctcgcatatgacgacaagcctgattgagtcttaaggtacttccggcaattcgtccagtttctttgacacgtgctttcccatcaataatttcaatttctttaccagaaaattcataaattccatcttttaaccctttacatggatttgcatcacagattaaaacaatacgatttttaccaattgcttgataagttgcctgaataacatcttcatgaatatgaaatttatcaacaattaactcacaatacaaatcagaaagaaatgctcctgtcacaactcctggattcctatgcaaatgctgactcatagcattatacaaatgggttattccttttgccccataactttgtgcttccattacttgagaagctgaagcattgctgtgaccaatattcatcacaattcctttattatgtccatgttgtatcaattctaaagcatgatctaattcaggagcaatggtcattgatttgatttttgaacaatgttgaagatattcatcaaatatatcaatttgaggaagcattagactttctattttcatgaccccaggcatttcttgacttaaaaacggtccttctaaatgaacacccaataaattatgaacattgcatttttcatattcatccaataaattcaacatatattcatgattttcacaggttaaacttgccataaaacaagttactccttcatctaataaagcatcactaatcttataaatatctgacatttgacaattattaaaatcaaaccctaaatcaccatgtgtatgggtctcaataaagcctggcataatataatgattttgaacatcaattgctctatcacaatcaatattttgataatctttatatactcccacaattttttgatcatccaccaatactgccccattttcaattcttcgacagccatcaataataactgttccatttttaattaatattttcatattctgtctcctttgatttattatctcacttgtcgtaaaaagatacaattaatatgaaaaaacacccacaaatatttgtgaatgtctttaaataagctgatcaaattgattgatgaacatgtgataaacatcttcatgttcttgtttttgaaaagatggtgtggtatgaagaactggtaaatcataatcactcttttctgacataaaataaataagttcatgtgctaataaatcattatctatttgtttccataaggcatgttcttcttcacttaaaaaagctaatccatatttttgaaatatagcatccattatgctagattcaatttctatatattgaggtaagtaagcttttactggtcgaatgatatcagaaatatatgcttcacttgcatcatgtaaaagacaagccaatataacctgatttgaataaccacgagcttttgcttcatgagcacaatttaaagaatgctgtgcaactgaataaaaatattttaaatgtcctccacctctgcacaataaactaagggcatgggcaatatccttaatttcaatatcttcctgagtgattgctagaggattgatttgttttccagtatatgtatgcattaacattttctttaccttgtcattggctctaaaattgttattgtgcgttgttcaacatccagttcgcattgcaagccataaggaataatcccaattggttcagcatgtccaaaattcatattcgttatgattggtaaatctggtcgatgaaattcttcagctatgacttgcttatagacctgattataaacttcaaatttttcttcaattgctggttttccaacaataattccctttaacacatcaaacaaaccctgtgctcccaagttacgtaataaccaacacaattgataatcaggcatatccacttcacttgtttcgacaaataaaatcttatctttccattcatcaatacttggccaaatagctgttcctaaaagctcaataaatacatctaagcatccacctaataatcgtccttgaacctttccttcaccctgtaaaacctgataccccttttcatcccgataaaactttctaggtgtattcacattttcttcactccacaaaacaacatcttgactataactacaaacgggacttgatttaatttcaaatctttctactggttcaaaaaaagcatgaacaagtgcgtttttagtataatcattgatttttatatattccgaccagttattcattaatgaacctccataataagaaaccaatcctgctttatacatcattaaatgattacttgttgtatcagaaaatcccataaatattttaggattatttttaataacatcaaaatcaatatatggtaatagacggatactgtcatctcctccaatagcattaataattgctttaattgaaggatctttaaaagcattcattaaatcttctgctcttttttgaggatgccgatacaaataatcaattccttttaacgcattatccattacttgaacttctaatccgaaatcattttcaagacgttctttcgcaatatccaatttatgaatagcccaatcctctcctaacattccgcgtgataaactgacaatcgcaactttatcacctttttttaatctctcaggtttaatcattattgtctccttttcataaataatatttaaataaatcaggtaaatctacccgaacatattcttcaacggcatgaataaatcgatgattctcatcataaattacacccctatgatgaataacattcatatcattttgaacattaaataattgtgcttgtaaaggggtaagtttagaaatagagacttcatttaaacccttatgatcaggataaatatgatattgatttaataattgataaagtgaatgggataaatcttcatttaataaaaaatcatcttccaaaggaaaatatgttgtttctaacataatcacaacaccatcaacctttcttaaacggacaatttcaatattttgttgatgagaaaaaaactgtagattttcttttttaacatcacacttttgacatgaaataatctctgatgttagacttcttccttgaatttgacataaatcagttaatgataaacattgttgtaatgattgattatgttttttcacaaaggttcctttcccttgtattttcattaaatagccttctttaacaagagtttcaattgcttttcttacagtaatccgactaacatgaaattctttttgaaactgtgcctcagataaaatcttatctcctgcctttaattcgccactttctatttgttttaaaatcacttctttcatttgttcataaagtggtaaatcattaccaatctttatatttgacttcattctatttcctcccccacatattatgtttttattataagatatatcttaaaaattgcaagatatattataaccattatataaccacttttaacatgtattttctttatttcatcttattatttaaataaatatattatctttttattgacacatgtattatacttgtattatattggtattataaaaagttatcattgaataacaaggaggggcaaaaaatggaaatcaaagaaattttaaaagacatcttaaagcaaaaagaagcgagagggaaagtgaaggacattgtttggatagcggctggtggaagtcatggtggattttatccagctcaatattttatggaacatgaagcgaaatcaatacgttctatgagttttacaagtaatgaatttgtgttttcaacacctggctttattggggaaaatacaattgctgtgatttgttcaatgcgtggaacaccagaaacaattgaagcagcaagaatagcaaagcaaaaaggtgcaagtacaatctcactttatgtagatgaatcagaattaacagaaatttgtgattataacattctttatcaatcaatcgctattgatgaaagtgatttttctcaagtcaatgcagctcttggtttaaaacttgcaatgactttagtagaacttgttgatggttatcaatactacaaagaagctatggatacatttgaacatattgatgaactttatcatcaagctgttgaaaatattagactttcggctatcaaatgggctttacaaaacaaagaatcacagactatttatgttatgggatcaggtccaacctatggagcggcttatatattttcaatttgtaatattatggaaatgttacagattgattcatcaacaatcaattgttgtgagtttttccatggaccatttgaagtcgttaatgaagatacttctattttcctactcgttggtgaaggaagatgtcgaaaagcagatgaaagagttattcgtttcttagatacatttggtggaaaaaaggtttataaacttgatgcacgtgatattggtttacaaaatattgatcatcatgtgagtgaatattttaatcatttattattttcaccaatcttaaataatgtttatatgcgtgaattagctcaacaaattaaaaaagattacaatacaagaacatatatgtggaagaatgcttataaataaaactatacgaaaaaagctaatcattgttagctttttttaataacataagttccatatggcttaatatgaatcactttgtttatctttatatcatcattacttattaataactttccatcactaaaatcacgtaaatcataatcatattcatgtgtagaaaaatttgtaataactaataatttctctccttgatattctcttgtataaacaaataaatcaggatgatctttttctaatagctcatactttccataaacaataataggcatttgatgacataattgtatgagtttttgataataatgataaattgatgtggaatcattgatttgttgtttggcattgattttatgataattaggattcactttcatccaaggtgttccttgagtaaatccagcatttgtactatcatcccattgcattggagttctcgcattgtcacgactattcgcattgattcctttcatcatttcttcgtgagttaatacctgtctttcttcaactaaatctttataggcattaaaaacttcaacatctttgcaatcttcaagactttcaaaatgataattggtcattcctaattcttcaccttgataaatataaggtgttcctttaagaaaatgtaaggcagttgcaagcatttttgctgagtctttccaatactcctgcgtctgaccaaatctagaaacaacacgaggttgatcatgattatcccaaaacaaactattccacccatcatccgctaagccttcttgccattttgttaaatttgtttttaacttaactaagtctaaaggaattggtgtccatttgccatattttcctaaatcaacatccatatgttcaaattgaaataacatactcaattcatcttcattttcaccagtatattgttttgcttgtgcaattgaacaagcagtaatttctcctactgtcatcacatcataatgcgataaaacctgatgattcatttcttttaaaaattcatgaatacgcggtccattactagtataacgtgaaggtttcatatactttgacgaggctggtaaaacatcttcatatgtttgaactttgctgattttattaatcacatccattctaaatccatctatgcctttatccaaccaccacttcatcatatgataaatttcttgacggactgtttcattctcccaattcaaatcaggttgctttgatgaatataagtgtaaataatacatgttggttgcttcatcatattgccaagctgaaccagaaaagatagaagcccagttatttggttctttcccatcttttccttctttccaaatataataatctcgataaggattatctttgcttttacgactttcgataaaccattgatgttgatcagatgtatgattcacaaccaaatccatgacaatttttatatttcttaaatgggcttcttttaataactgatcaaaatcttccattgtcccataatctttagaaattgcttgataatgactaatatcataaccattatcaacattaggcgattcatataaaggtgatatccatataatatcaatccctaaatcttttaaataatcaagtttagatataattccttgaatatctccaattccatcaccattgctatcacaaaaactctttggataaacttgataaataacactttccttccaccatattttcatacttccacctctttccttattattttaacatttttatatgacatttatagtgaaaaaaagcctatctcataggcaattattgaccaattgctttacgataagcctgtggtgtttgtttatatttttctctaaatgcttttataaaagccttactatcagcaaaaccatgttttaaagcaatatcacttaccctatcatgggtttgacatatatcaataaaagcatgatttaacctaataagctttatatattgaaaaagactcatatcacacatctttttaaaatatcgacaaagatatgatggagaataatgaaagattgttgataatctatcaattgttaaatcttcatgataatgattttcaatataatctaatatgggttgaattttttctaattgttgtgatgaaaaaatggattcttgacgttgacattgaaaatcatgcagcaataaataagaaatacttgcaagatattcgtgaactttaatttgtttataggattgagaacttttacgataagcatccattttcataatcttttctttcaattcatcatgtttttttgttgctttattcaaatcaaaatagattttatcaatattattttcataacttcttaatgtttcataagatagtaaaactgtaatcatttcactttcttctaacatctcaaaataatgaacctcattggtattaaccaaaaacaaatcatcagaatgaacgatatattcatttttcccaacatgagcaataaaaccaccttttatcacataaaccaattcaacattatgatgaaaatgttgtttcatataatgatatgttggtaaatataaatgataaactctcgcactttgattatttggaatatccacaacttctaattcataattcattttttcatcaactttcttttcaaatgatcctattcatttttattatgtttcactcttatcaattcaaaaataataaataaaatagcaataatgatatttataaaagaactattttctttttttatgatgaagttataaagtgaaataaccaataaagcaattgcaatcataaaggaaattatattttctgttttaaatttcatatgtatcaccttctttacattcattttacaatgattttcctccaataacaagttaagactctaaataagaaacaacctattgaatatgcttttattcatcattgattatatcttttaataaatttaactcaattgataaatctgatgcacttcctcctcgtccttgtgtttcttcaagtgatagtgtttgtaaattcagtctttcattgggttgtataatatcatagagttttaataataaacttaaaggaaattcttcattccattcaacataataaccatacaaacctattctttttaaaagtgaaaccaatccatctataagactttgaacaaaaacataataattacattctactacaacttgttcaattaattcttttcttgattcatcctcaaatgattgaatttctatttgtagacaatttcctttctttgtcaacttccaatcatcgatagctggctctacgtaagcagtgaatgtatcaaaatacccattatctaaaagatgaccatcaatatacaacaatccttttaaaagatcatctagaaaatgagaaatccaactataattaaaataataatggatatcattaactctcatttgaccatcaatccagccagcatcaagtgtataaaattctattttcatatatgacttttcttttttgataaaagatcactgatatcaaatggtgtttcatcatgagaaagtgaatgaacatctaagaatggaacatcttcttttgttcttattggaaactcagattttgctgtaacatttttcatgtcacaaacaatttcaccaatatacataggtggaattgtttttcgactttgaaggggaactatttctctttgattgcatgtataaagcaaattatagcctttttcaaaagttgtataatcatcattggcatcgataattctgattacccctttagcaataactgaacgataatcatgataatgtcctttatatttacaatcaggaaaatcatggaaagcactaaattctaagcaaaccttaggattttttcgcattaaatcaagcttatgtcctcttttcataaaatgaacataaacatataatttctcatcttttaattcatagccaaaattaagaggaacaacataaggataaccatcttcatctatcataccaacattgacatgatgaaataattgaagcatttcatgaatgaatataggatcagtaacttctctttcaaaatgtatcatttttcaaactcctttactttttgtattacaaaaagtatctcataaatgaaattatctttcaactttctttcattattttaaaatgaatgtcttgtgctttatcctttatatatggattattgaaaaatgaataaagaagctgtaaacacattaaacaccaaataactggttcacaaataataactccaaagtatcctaacattggaatacataaccaggcaaataccaccttacctaaaaattcaataatacttgaaacaaggggaacaattttctttcctaaaccctgcaaagcatttcttaaaataagtaaaatacctaaaactgcataaaacggagcattgatttgtaagtacagtgatccattatttaaaacaacggattgatttgaaccagaaattagtgcaaccaaaggtttagcaaaaactaacataaaaattgtagcgagaatcccccacccaacaacaattttaaatccaactttgatgccttcaataattctttctctttgattagcacctttgttttgggatacaaaggtagaaagtgaagctgctactgtgccacaaggcatcattaaaaaagcattgatttttcgtgctgttgtatgccctgcaatagttaaataaccaaagccatttatggccttttgtaaaatgactgttcctgaagaaacgatagccatcataaatcccattgaaaatccttgtccagtcagttcttgataaagttctttatcaaaatgaaaatgaatacgtttaggaattaataatggtgttttcttcaacatataaataaggcatagaattgctgaaataccttgtgcaataacagttgcaatcgctgctccttgtattcccatatgaaattcactaatgaaaagtaaatctaatatgacattgattattgaggaaataatcaaaaaaatcaaaggcataacactattaccaatggcacgaagtaatccggcacataaattataagcaaacatgacaccaacacataatgtaatcatagatatatatgaataagattcatgaataatattttgtggcgtatctaaaagttgtaaaagtggatagagtccaagctgtgagataatcataataatgattgttaataagaatcctataacaagtgagcctgcaactgaacgttttaataaatcatgatcattagcaccatagctccttgccacaacaatactcaacccattaccaactcctaatgcaaaaccaattaacaaatcataaactgcactgcaagcgccaatcgcagctaaggatgtatctcctaatacatgcccaacaatcattgtatccatggtattgtataattgttgaaagatgttagatataaagattggaatagcaaataaaagaattgcttttcctattttatctttgattaaatcaacttgaaaatgaaacatataagcctcctataaatttgtaaaatcatgattgtgaatctctacaagtgtaaatattccattttcatattcatactttaaaatacaacaattatagaatctttccgtctttttcactttcgcataatcttcccatgctcgataaaattgagcacaagctgctccatgtgacagcgctaaaacaacctcgtgatcttccttattcataatatctactaaagtttttgaaaccctatctcttaattctaattcgccttcgcctccaaattgtttaaagaaatctccataaggtaactttggatttaaacattcatctttaccttcaaatgctccaaaattccattctttcaatcctttcactcttgtatatggcatctgataatctgtaacaatttctaatgtatcacatgctctttcagaagttgaactatacgcatgatcaaaagttatttgattttctttaaaatagttacctgcaatttgtgcttgcttaattccaagtttagtaagtggtgcgtcacaccatccttgaatcttgtgttgaacattgaataaagtttgtccatgtctcattatatataaagtttttttcattatctttttcctccttgttgatttgaattcactatatcttttaaagtaatatcttgatgacgatatcgtacatcaggatttttatctattcttaattcaattgcatgaaatgggcaattatgcacacatgccaaacaaaaatcgcatatttgacaaagtcttttcgctttgcctttttcaagaacaatatttccaattggatagacctttgtacaaataccacatccactacaacgttcactcatcatattggtatttaaaagaaaatgaaaataatctaaaatcatttttatatcatttagtttaaatagaaagtcaaaaagagttatctatctttaaatcaaagataaacaactctttttcattatattatttcactattttaaacttacctctttgtttaataacttcattagcatacttcaattcataataagaaatgccttttttcatcgcatttatgatttcttcaacttctttatcaatatcatctttgtttaaatataaacctaataatgtataatttccaccaaagaaaccagttccctcgacaccccataaggcatagtttgcataatcctttctttcctttttatgatacaattttcctgaagatatttttgaacatgttgcaaatgattgatgatcatatgcttttataacaatctttcccgttatatttgaaatgtcttttttatctctttctaacatttcttctgacattagtgtatctaaagaaacgtctaattgatttgctatattgaacaaggtttctatttcaggataacctaacttctgttcccattttgatacagcttgtctactcacatttaacatttctgctaattcctcttgagttaaatttttatccttacgaattcgtttaagattatctgaaaagttcatacaaatcctcctttcttaatctcattataaaagatttataatcaaagtctaccaattcttcgttgcaaaatgatacttatcgtatcaaaaaagctaattcctaaatagaattagcctttcaataaattataattcttccccatttgtttcaataacgtgtttataccaattaaatgaatctttcttagatcttgcaaatgtaccagttccatcatcatgtctatctacataaatgaaaccataacgttttgcatattgtccagttccagcagaaaccaaatcaatacatccccaagttgtatatccaatcaatggaacaccatcttcaattgcttcactcatagcttcaatgtgaggtttgaagtatgcaatgcgataatcatcgtgaatcgatccatcttcttctttgacatcaaatgctccaaatccattttcaacaaccattaaaggtgtttttggataacgatcatgtaatttatttaatgtataacgtaatccatcaggatcaatttgccatccccaatcacttgcttttaaatatgggttcttagcaccttttgtcatattaccagaagatgtttccgcattttcatcaactgtaatacagtttgattgataataagagaatgtatagaagtcaacagttccttcttttaaaatcttcttatcttcttcagtaatatatgaataatcaataccattttctttaaagaaacgatatgcaaaatcaggatattctccacgcacttgaacatcaccacataagttattctttaagttatcttcatcataacaagctaaaatatcttttggatttggtgttaatggataaactgttacatgtgcaatcatatttccaatcataaagtcaggattaatttcatgacctgctttaacagttaatgcacttgcaacaaattgattatgtaaagcaacatatgttgtttgcatatttgattttaattcatttaatgggatacgatgatcagcattaacatcttgtggatccataattcctaatccatataaattaccaataccaccttcacccatacaagcgatattaatttcattaaatgttaaccaatatttgactttgtctttatatctttcaaaacaagttgtcgcatatttaacaaacatatcaatcacacgacgatcagcaaaaccattatattttgtaactaaattccaagggatttcatagtgacataatgtaattaatggttcaattccatattttttacattcatcaataacactatcatagaaagctaaaccagcttcatttggttgttcatcatcaccattagggaaaattctaccccagttaatagaaaaacggaaacacttgaatcccatttcagcaaacattttaatatcttctttatagtgatgatagaaatcaattgcttcatggcttggataaaatgcttctggatcagtttttggtaagaatgttcttggtgtattaacatctccacccaataacatatcaggtactgataattttttaccatcttctagataagcaccttcgcattggttagccgcaacagctccaccccataaaaaattttttggaaaactcattttataatctcctcctttaatttttctgtatttattctatcatattcattatttattgtttacaaattttcatattttgaatatgtaataaaaaaagaacaaaatcattttcatcatcttgttctttttcctgacatatgtattttcttcacactaagataatatttttaaaacttcttcttcatcttcaacatcaaaaatcttgattgtcaattgatctaacttatcctttggactgacttctatctgcatcaccaactcttttgatacatgtcctagtttctgtttcaacaatttgataagcaatactattttctctttcatcatcccttgcaattcaccctgcttgattccttgtagctctctttctcttgcatagctgtcaatcacttcacacatcttgatctcctcactttcttctttctctaatctgataaccaattcttcactattagtcattatcgctactacaatcgcttcatctttacttaataccagatcattcaagctttctttatcccgatcccattgatagattctctggacaccttcaatgactgctttaacctttggattctttaaccattctatcctgatatccttgatatcatagatatttccattccagttattcacccatcctttcaaggcttctggaatttccatccgctctataagtgaatatggctgatgccacagcttatctccactatacaaaacaagtgtcaagacgggaatgggatgaaatgatttacgcttgtcctcatcctgaaggttgaactgctgctgatatgtaatcgtatcgtaatccatgacacgaaaaggcatagaatagtcaaccgttgactgattctccagacccagcagaatcgctatcccattgactgtacacttcatcagaacatccctttgcttaccaacgccaatcacctcatcatcaaactcaaaatgcgtcgttgcattggcatcacataagacaagactgttttcatcaatgagtgcccttccctgaaaaagcatagcattcatcaaatccataaagttttcaacttttttaaagaaatccttgtaaatcagatcaggcttagaaatcagttttgtttgtttttgaataagtaaactcataattatttttcctcctttttatagttgaaaaacactgaggaaatataaatccctatacttatatatacgcttgcaaagtctgatttttcttcttttttcttaaaaaaagttaaaaaacttttcattcacccatattatagcacaaagcaaacttttatcaattacttaaagcaaataaaaaggggctgtaacgagtaaataaacatgttatagtttcatattacgcaaaaagcgctcatttgagcgctttttttggtataatttagtcgatgaaaacaaatatatacgagacatattataacgcatatcaaccttatatgctactagattttaacttatcttttgatattgatatccctcatgatgatatttgtagaactgttcttgaagttacggaaaggattaatttatataaatatgttgacttctctaatagaaattctcatgggtatgatgcttttatgatgttcaatcttgttatcctagctaaagctctttttggttatgcttctaccagagaccttgaaaagctttgtcagactgatatcagatttatgtttatcgctaaaaatcaaaaaccttctcatcagtcttttcatagatttattcatgatgatctgactatgaatattgaagatattttttatgatatcaataagtatcttgaatcaaatatggatattgatactgatgttttatgtattgatggaactaaatatgaagccaatgccaataagaatacttttatctggcgtgccaatactgttagaaatagaacgaaaagatggaaacgaacacttaattgtattcataaaataaacaattatttttctagtgtcaatatatcaactcgatattcattattaaaagaaccaagtattgattatcttttaactatcagtgaaagattagaaaaatatatgctggatcagaatatacagatggtccatggaaaaggatgcagaaagccagttatccaaaaactatatgaggaattaaaagaaaatgccttaaagatgtgggaatatgctattcatatggatatgttacaaaaccgtaatagttgttcgaaaacagatcctgatgcaacatttatgcatatgaaatacgattactataatcatacaaatgtatttaaaccaggatataatatccaatttggggtaagtgatgggataataagaaacatatatattagtagtgatggaaatgatttaaaaacatacataccatttatgaaaaaatataaggaagcatatggaaagctacctaaaagaacaccagcagatgcaggatatggaagttatgataattatagttactgtaaagaaaacaatatcgagctatatatgaagtattcaggatattataaagagaaagaaaaagtaacagaaaaaaacagatataaatcaatacactttatcaaagatgatgaaggaaattatatatgtccagctggacatgcatttgaacttgaaaaggagacaatcgatagacaaggagaatatgaaagaataaataaacattatgtaaatagacattgtgaaggttgcccattgagaagcaaatgcaccaaagcaaaaaatgggagaacattggtacgttgtgataagctggaagaatatcatcgagaggcaagaagcaacgtgacaagtgatgaaggtatcaagctgatgaagaaacgaagcaatgagtcagaggggacatttggagatttaaaatataatcagaaatatgacagattacgtcggcgaggagaagctggagtaaaattagagatatatttaatagcgataggagaaaacctaaggaaatatcaccgaaataaaatgaaagaaaaagaaaagaaacaaataaactaataaatttttaaaataaaagaggtagttctttttaagtgcgccaaaaagagtaaatgaatgagaaaaagaaagagtaaaaaggctaaaattttctcattcattttaatttacaaaaaaagagctgtaacgctctaaaatagttgaaaaactacttactcgttacagcccctttaaatcgtatatgataataaattatttaaattaagtaaatcttatcagaagaacagatcattttataatttaaaataatatttttaatattctagctaaaccatcttcatcaatccgtctacaaatcaaatcagcaacatcttttaattctttaacagcattacccatagcgactccaacatgacagtattgaatcatttctaaatcatttattccatctccaaatgcatatgtatcatcttttgttaaattataatactctaaaactttttgaattcctactgctttagaaattgttggagaatacaattcaaatgcattttcactaccatgttcatcataatttacaacatatccaaaatcattttttatataatcaataaccttttctctattttcatcagttacatttgcttctatttttaatgtcctttgaatcacatcatatttatcaaactccgttttaaattgactagcaaatcctactttatcaaaaaaatcatataaatcattattttgattatcaatataaacatgttttgctgtttcaatcatataagaacaatctaatttttctaacatttccattgtttttactgccagtgttgcatccattcgatcttcataaatagattggccatcaatttctacataagctccatttgctaatatatagccatcaaatccagcctctaaaatttcctgatttaacattgctcttggacgaccactagatataaataatttatgccctaatccttgtaaccttttcatttcatctttaacagtttgtggaatatccacaattcctaaacgactttctaccaatgttccatcaatatcaaaaaataatactttcttactcataaatcctcccatttatattttctctataagcttcccattttcatctaacaattctaaataacttttaatttgataatcagctaactgattaatttgctcacgctcagcatcagaatattgatcctcaataacaacacattcaattcctgcatttttagccgcttcaacaccaatcaacgaatcttcaaaaaccaaacaatcttttgtagatacttttaaatctttcatcacacgtaaatagatttcaggatttggcttgatagcttttgcatcttctcgtgtataaacaagcgtgaaataatcatcaatatttgctttagaaataatacgatgattatgttttcgataaacatccatatttgtacgcttagttgttgatgcaataacaagttgatagcctaactcctttaaacttttaataaaaagctcagctccttctttgtaatctacaacatgacgcaaataatcctgagctatttcataacgcaatgcatgaatgtcttgaacactcaaagttgattgatacgttttttttaaatatgtacagtattctatataaggattatctgcctgatcattttttcttaatacttcatcacgctttctttgtacatttttaatttcactttttccatcttcacgtattctttgaatcaaagcttcatcaacttgattccaaattccgactgaatcaattaatgttccatccatatcaaatataatcacttttttatctttcaacatcatttattctcctcaaaatctccagtaatctctaaaatattccatccggatctttaatattaaaataccaataaggcatatgaacattgacatacataagttttgagacttctccaatatttaatgataagagtctttcatactcagcttttaaattatctacctcaaaattcaaaatcattatattattctttttttcatcatcttcaataaaaaaatcatcaatatattcttgattaaaacatttatgattttctataattttttgatcatattctttattatacaaagaaactgtttgtccacatttaaatgtaacccatctttcttcattcatataaataggatcttgttgtaaaagtaatttataaaaatttattgatttttccatattcttaacacaaatatatgttgttcctagccttatcataatttttcattttcctttatgtttctccattcatcttctaatatagccattatgatatcatctgcatactgttttccatccataatagcatcttttctaactccttcaacctgaaatccagctttttcataaactctttgtgctctatgattaaaagaaaaaacatctaattctaaacgatgtaattttaacatttcaaaagcaaaatctcttgtcttttttaccacccatgttccaattccttttgaacaattttgactatcaaaaataacaattctaaaattagctgattttgtttgccaatctatttcattaataacactttctcctataaattttccagctggatcaataatcataaaatcatatctattcttatcatcaataatccgattataatattgaataattgtttcatagtcaaattcttctaaagttcctgttaatcgattaacttctttatctattttaccaaagcaatcttgataatactttttagcttgtcccttttcaaaggattgaagtctatatttgcccttctcccagcttatttttattttttccatttttctccccactattaaatataattctgttactatattttacagatatcttaattaaataacaatctcaaaaatatatttatataatttttcatccatttaataatcgatagtcatttgaaaatcaactgctaaaatatcataaacaagatcataagtataaaaacgataatgtttatataatgaacaatcaatatcttttctaataggtaatttttctatccatctacttgcattcaccattacaaaactactttgataatcagcattattttcaatcatttcataagtatctaattcacaagaaaaataagccagtacttgttgaaaaaccaattgataagaaatccaatcatttttatttgtattattataaatcaaatgtccattaatatctccactcaaagttaactgaccaaaatcatcttgaatgagcgtatttaaataaacacaatctcgtccttgtaaaatacctaattctgtttgtattgctgttaaagtttccatgactcattctccatttttttaagatacaactattatgccatcactctactccaatagcaagttctaaacatttttatagaaatatgtttcaaaaaaacaggattgagaatatcgaaaaagatgtgtataataaaatcaattctaaaaaaatgagtggaggggaatatatgtttgatttagaagcagaaatgatgtctgttttaagagaatcagaagatcatgaattattagaaacaatttctacagccaaagaattatttaatgaatgcgtagaaactaagaaaattattccaactgaagaatcatacatcacaatatcaaaaatatttatcggtgctatttttatttttcttgtcttatttttactatttatccaatcgaaaatctatcctctcgctgcattttgctttgctatatcactttttttaattataattgccatagtattttttgttgtcatgaatgttgaaaccaattgttggttagactttcttgataatgaaactattgaaaaaataaatcaacttatagaaaagcataatatgaaaattgttgatacagatgaaaaaatgtttcttaaaaagaaacataaaaagattattgctttatcacataatgtctaaaagaaaaccaaaaatctcatacctttatatcatatttagactaacatcttcatataagatatttcgcttgattctataaattttaattttgaaaatagatatcctataaaattcatattatttattctgtattccatcaatcaaaaaacatgtgcccttttgacatatacctatagattatatgttttctttttattcataaaattgcttgaccaatatgttttttaatctccattgtggagccttaccatcatcaacccaatattcatccattgaaacaattttatcataagcctctcgtaaaggcatttcttttttgcttacaagaacgtactcaaataaagcttaaaatgtctattactcaaacaagcaacacaaataatgttgcttgttattgtttatataatcttacaatattttcaatgtgatgactttgtggaaacatatcaactggttgacaaatatctgcaatatatccatgttcttgtaaataagcaatatcgcgtgcttgagttgcaacatcacatgaaatataaacgactttatctggagccaaggtaattaattgatctaagaaaacttgtgaacatccttttcgtggtggatcaaccatgactacatcaatatgtttattctttttggcaaatttcaccataaattcacctgcatcttgacaagtaaattcaacatttgaaatatcatttcttattgcattttcctttgcatctataatagcctgttcaacaatttctactccatatactttttgaacatattgagccattgataaagatattgtgccaattccacaataagcatctataacctcatcagtaggctttaactctgcaaaatcaattgctttttgatacaaatgttcaacttgaataggattaacttgataaaaagattttactgaaatacgataagtatttcctaataattgatcttcaatataaccaggaccatctattacctttacttcatctcctaaaataacattatcatgtcttgaatttatattttgaataacagttgttaaatgaggaaattctttttttaaggttgaaatcagataatcaatctttttgattttcttttgataagtaatgaaaacaagcattaactgttgagttgtaaatgcatattttacaaggatatgacgaatatttccctgatgagtgactttatcataaggcgtttcttgaatctcctgtaaaagaatacgaacacgattaattaattgatttgatgcctcattttgaatataacatttatccattggaacaatatcattactatgttgcttataaaatcctgttacaatcgtattaccttgagttcctactggaacttgaactttattacgataataccaaggttcttccatcatcaaacaaggttgaacttcgacatgacagtgcccaattctttctaatgtatcttttactcttttggttttaaaattttgttgaccagcaagtgataaatgttgtaaatgacatcctccacattgtttaaaaatagggcataatgggacttgtcgaaaaggacttgcttcgtaaatttcaattaatctccctactgcataattttttaacactttaataatctttacttttcctacttcattaactaacatatttttaacaaagataggaaaactatcaactttaacaattccttgaccatcatgtgtataatcaatacactttgcttctatatattcattctttttcattcctacctccaaaaaaaacgagcaatgctcgtttatttattatttaaagtttcttttgctttatttgcactatctttatctcttattgaagaaagggtataagagaaatcatcattttgtacattctttgttccatagattggaaaatcttcactatttttagaagttaaatataaattcacttcatattgataaatattatcaatcttgccaaagagtgtactatatgttttcccattttctttaggtttacctaccaaaccatccaatgtttgaactgttttttcagcaatctgttttgctttcttcgtactcataccatctttaaagataatatcaacttttaattgacgacattctgtagatagtgataaatcttgtatttcagaatattctttcttcattgtatcaattgtcgcagcttgtaaatccttattaattgatacaataccttcacaacgttttccataaacaggaccatcattttgtgaagcaaagaaaatatatgctgcaaacgcaatcaataaaacacctaaaccaattaataaataatgccaccatttccatacaaactttttctttttcttactcataggttgattatcctcatcatcaaaactttcaaattcatcagtatattcatcttgattcattgattgagcagattttgccattctcatactctctaattcatcaatatgagaaggttgctggtattgatcttcaatatcatcatcttcatcatcaaattgaaatcttttagccattttctcacctactttccactattgtatcaaaaatcataagaaatgtataggacattattgtactctagcttttaataattgaattaaaatttgatttgttacttttggattcgcttgtccaccagtctttttcatgatttgtccaactaagaatccaactgcacggtctttaccagcagcataatcttgaatagattgttcatttgcatctaatacttcattaataatatttgtaagtgttgttggatcagaaatttgtttcattcctttttcttcaataatcacttcaggatcttttccttcactcattaaacattcaaaaactttcttagcttgctttgatgaaattgttccatcttggatgaatgaaatcatttttcccaaatatgctggtgttaattttgtttcttgaatagttagattttctttatttaaataagcttgaacttcacctaataaccagttacataccaatttatattcttgacaagtttgaattgtttcttcataaaaatctgaaatatctttagatgcaactaaaatatttgcatccgtttgtggtaagccatgtttttcaatgtaaagtttagcacgttcatctgccatcattggaagctcatcttttatttgcataacccattgatgatctaaacgaataggtagaatattaggttctgtgtaatatttataatcaacagcatcccctttagcacgcatgacaactgtttccttgctatcttcatcaaaacgtcttgtttcttgtttaacttcgccaccttgaattaaaactttttcttgacgcatagcttcaaattcaatagctttttgtacatttgaaatagagtttagatttttgatttcagtacgaatcccaaactccccacttccaaaaggtcgaattgaaatattaacatcacaacgcattgaaccttcttccatcttagcatctgaaacatcagtatataagaaaacctgtcttaatttttctaagtaagcagcagcttgcgcaccatttctaatatttggtcttgtgacaatttcaatcaatggaattccagcacggttataatcaattaatgaataatcatcaaagtgaaattgttttgctgtatcttcttccatatggagacgttcaatttcaactcgtgtcacttctccatccacttcaatatctaaatacccatttcttccaattggtcttttatcttgagtaatttgaaatcctttaggtaaatctgaataataataattcttacgatcaaaacataataattcatcaatttccatatgtaaagcatgacaaacacgaattgcaaattcaacaccacgtttatttaaaactggcattgttcctgtcattcctaagtccacttcattaaccattgtattcacatcttcaccaaatgtcactggagcagcggaaaacattttagaatgtgtctttaattcacaatggacttctaatcctatgacttgttcaaaattcatcttctacccctccctcttatattgatttttaaagttaagtgcattttctaaagcataagcacaatttaagactgtttgttcttcaaaaatacgtccagataaattcacagcaattggcatcccatcaacaaaacctgatggtaaagataaacttggcgttcctgcaaaattagcaagcgaaagatgattttctaaaatcaaatattcatcgcttaaacgatcatcatatgcttcatctacctttggagcaatacttcccccattaggtgttaaaataatatcataatcctgataaattttatttaattcttcaacaattaaacgtcttactctttgggcttttctaaacattctttcttgattttctgtcgcaagtgctaagtttccaagaataaaacgacgtttaatatgattaccaaaaccatgtgtacgagaattaatcataacatcatctgtggtttttcctggttgacgatttccatatttaattccatctaaacaagaatggttacttgttgcttctgaattggcaataattgtatatgtaggaagcaatgtacgcattaattgtgttggcattgttacattttcaacaatagctcccaatttttttaatgtttcaacaatactttcaaaatttgctttgatttctggatttctaatttcatcactaactgatgtcaaaacagcaatttttaatcctttaatatcatcagttaagttttccaaataatgtggtacttccttaaaacttgaagtcatatcacgattatcacgacctgccattacttcagtcacaattgccatatctctgacatttcttgtaaaagcccctactgtatctaagcttgaagcataaggaattacaccataacgtgaaatacgtccccatgttggtttaaatccaacaataccacaaaatcctgcaggtttacggattgaatctcctgtatcactacctaaagcaaatggtacaactccactagcaaccaaagccgcacttccacctgatgaacctcccgcaatacgtgaagtatcccaaggattataaaccggacccgttaaagcagacttatttgttccacccattgctaattcgtccatagaagcttttccaactaaacaaactccttgtttacttaataagtccacaacatgagcgttatagacaggtacataatcttccaacatacgacttgaagctgtggttttaattccttttgtattataattatcttttaatacataagggattccatttaataagttttcaaaatgtgcttcttttaaatcagcatatgctttttccttagtaattgtcacaaaagcatttaatcttttttgttgtaattctacttcttcaaataattcatcataatatgctttaggatcaatagccttagatgcaaataattgatgaagttcctcaatactatattgaatcatttatcccaccacctttggtactttaatttgattatcttgaatattcttcgcattctttaaagcatcttcacgactaatcacataagtttcatcatcatctcttaaataagttgtttctatttcataaggaaaagctaaaggttcaacatcagttgtatcaattgcttccaatgcttgaacgtgactcataaaaacattatattcttcaattaatgctggcatttcttcatcactgacatcaaacattgttttacgccctaactgtttaagcattttttcaatatcattcatcattcatcctcctaattcataaaataacttttcacactatcgcctttatctttaataataatagcttccacatcatcttgcgaataaaccaataccttgacattaaaatcatcactaaacttactttcaattccatcagcaataattgaagttaaatacattagctctgttgatgttttcacattcaaatgcgctttaatcaccatcgattgaatttcatcatcaatatatcttgcttcaccaacaaaaccagctgcttcggttgctgcattctttaaactcgttttgacagtatcaaaagctgaagccgttgctttatcatattttgttgcttgctcactcgcaaataaaactgttctttgattaagtgtactgatttctcccaattctttttgacaataacttttcaagatatatcgcccactcgttggatcagttgttgtatcagcagcctgataaaccgtaatcaaaataggtagattttttattttttcaaattcatcagcactacgaatgactttgtaaaatttttcaatacattcttcaccataacttttaatagctccatcactcattgcactatctaaacgtgaattatcactttttcgcggttcaagaattaaggcaaaagacaaaccttttaaagtatatttatcaccactttttacataataatcttgttcttgaatattttgcagcatcgttgggttttctacattttcaataacagttccttttttaggctgcaaagaatattgagaagaacggcttaccatttctttttgcatggcaagctttaagtattgtccttcactcatataatgattatttgttgaaaaataaggtgttgataaaatttgtaatcctctaccaatagaagcaaagtcagttgaagaaccataatccaaataaaaatcttctcttaactcactatcttcaaatttaacaatcttataataagaatcatcaaaagaatccattgaagctgtatggtttgcagtttgttcttgaactgattccttagcctgatgacaaccaaccaacatcattaaagctaacagagcacagactaattttctcatagaccaacctcctctttaaattcttcttcactcatgacttgaacacccaattgagttgctttttctaacttacttccggcatctttaccacaaattaaataatctgtttttttagaaacacttccagttacattagcacctaatcttgctagataatctttgatttcttttctagtcattaattctaatgttcctgtcacgcaaactgtttttccattaaagatactttcttgtaataaagttgtttcttttaagtaatccatatttaaaccaatctcttttaaatgattgattaatgccagtgatgcttcatcacttctaaaacgattgattgattgaacaattgtatcaccaacatctttaattgataataatttagctgtagaagcattcaatagaccatccatgctcttaaattccttagcaagattatcagccatctttgcccctattcctttaattcctaaaccaaataaaagtttttccattgaattttctttactcttttcaattgcagcaatcaaattatccattgattttctaccaaaaccttcaatatccataatttcttgttcatgatttgctaaagaataaatatcttcaatgcatttcacaaaacctaaattatagaattgttcaataatcttttcacctaaaccttcaatattcattgcatctcttgaagcaaaatgaataattctttctattttcttagaatcacaatgttcattcaaacaataataagctgcttcattatccttacgaaccaaatgactaccacaatatggacatacttcaatcatttgaaattctttttcactaccatcacgtctttcctttaaagaacgtacaacttcaggaataacatccccagcttttctcaccacaacataatcaccaacacggatatctttatgtttaacattatcttcattatgtaaggttgcacgttgaacagtacttccagcaacacgcacaggttctaagacagcatttggcgtaatttgtccagttcgtccaatagtaaaaataatatcttttaattttgttacaacttcctcagcaggaaatttataagcaattgcccattttggaactttcgctgtatatcctaaacgttcttgatattctaaattattcaccttaataacaatcccatcaatttcataaggcaacgtttgtcttttttctgtcatttccaaaataaatgcccatacttcttgaatattttgacaaactcttgtcatagggttggttttaaatccaagttttttaatataatccaaagcttctttatgagttgtacaacctacttcagcagctgtaggaaccatgtataagaaggcatctaatcctctttttgctgcaattgttgagtccaattgacgaacacttcccgctgcagcattgcgtggattcgcaaacaaagcttctccagcttcttctctttgacgattcaattcattaaatgattttttcggcatatagatttcaccacgaacttcaaaatcaccatcataatcaatcgttaaaggaatcgatttaatcgttttaacattatgggtgatatcttccccaactgttccatctcctctggttgctccataatctaaatgtccatcagcatagaccaaagaaactgctaaaccatcaattttcaattcacagacatattcaacatttggatatgtttcccgaatacgatcatcaaactcacgtaattcatcttcattaaaaatattacctaatgacaacatcattctttgatgtgtcacttttgtaaagctatctaaaacttgtccaccaactctttgacttggtgaatcagcagtaatccactcaggatgagccatttctatactttgtaattcttgcatcaaacgatcatattcttgatcggatacagttggattatctaaaacataatattgataattatattcatttaataactttttaatttcttctaatctttcaaatgtcatatcaatacactccatttcacttgctcattatatcaaaaatcatcattgaataaaactaaaaaaagcataaacctatacatttatttattgtaccatattatcaaaagataattcttaacttttccttaataaatcaaaaaaggagaataatctcccttaatttgataatcgatgcaaagctttatgatgagccattaatgttttaatcccataaggaacagaaaatgcaatatccaaagtttttccattcactttcacaataactcctttaccaaaagtatcatgttcaaccaagtcaccctgtttccaatccgtaatttcattatcaccaatcatctcatcaacacttggtgttaaatgcaaatattctcgagatttaaattgagaaggattccctgcatgttcaacatgatcacttccaatttcatcaataaaacgtgatgacatcttaggcgaattcgttataaaattaaatccttgactatccgttaaatacaaacgctttttagcacgtgtaaaggcaacatatgccaaacgtctttcttcctccatgccatcatctccaccttcggaaacacttctaaaacttggaaagatatcttctgataatcccaccacaaagacataattaaattccaaacctttagccatatgaatactcattaatgacacatattcatcatcaaaaatatcatcttgtgatgtatataaagcaatatcttgtaaataactttcaaaattagctgaatctggatgtgtattcatataatttgtgatagaattttttaattccattaagttttgaatacgattttcatcttgatcatttcttagcatatcaaaataccctaaatcaattaataatttttcaaaaagatcaggtaaagctaatgatgaatgtttagcattttcaatacatgttacaaattgacttaattgttttttggctttaccagaaataccaatttcatcagcatataaacataaagcttcataattcgttataccatattcaatagctttattttgaatcttttctaaggtttttgacccaactcctctcgctggaacattaacaatcctttcaaaagacaaatcatcctgattgaccatcaaacgaatataacttaaagcatctttcacttccttacgattaaagaactttaaaccaccaaatatcttataatcaatttgacgttgaataagtttttgttcaaaagcacgagaaagataattagcacgatataaaatcgcaaaatcatgatagttcacaccctcaacagtatgaataatattctcaattgtatcacaaacaaaattagcctctgcttcttcatccactcctgaataatgcatgacttttggaccttcttctaattctgtaaataaatctttttccattcgatttttatttttacgaattaaattattagaaatatcaagaatggtttttgtagaacgataattttgatctaaaataactgtcttggtatgagggaaatctttttcaaaattcatgataaaattaatatctgaacctctaaatgaatagattgtttgatcaggatctccaaccacacataatgttgattgaccagataaatatttaattaatttataatccacttcactgacatcttgaaactcatccacatgaataaattgaaattgtctttgccatctttctaagatttcaggatatttttcaaataattcaacagtctttaataataaatcatcaaaatccaacataaaatgttcttctttatattgttcataatcttgataagcaattgcttttttttgttcaccaataaaatcacccgcaaattcaaaagcacgacttggtgtaacgccaccaatcttacatgttgatatataattgatgcaactttttaaactaattgttttaggatcaatttgacgttctttaaagattttctttaataatgatttttgatcttcttcatccataataataaaattattaggataatttaaagctcgtatattttgtcttaaaatacgaacacataaagagtgaatcgtacagagtaatgcccctgaagcatagtctcccaataaacgaatgactctttctttcatttcattagccgctttattcgtaaaagtaattgccaatatatgacgtggttcaattccaatttcttcaatcaaataagcaatacgataagttaaaactctcgtctttccacttcctgctccagcaataatacgtaaatgcgagtctaaataagtcgctgcttctttttgtttaggatttaataattcatctaaattcatatcgtatcactccttcgtttgtttattataacacattttaaagataagaaaagtgatgaaatcactcatcacttgtctaaagatgaaaaatcatgattaataatctcaaccaatgtaaattcatcattttcaaattcaaattttccaaaattccattcttttaaacctttaactcttgtataagctattttcccctgtgtcgcaagttcaagcgtatcacaagcacgttctgatgttgaagcataagcatgatcaaaaacaatattatttttgataaaatattcccccgcaatacgagtttgattttctccaagcacagttaagggtgcatcacaccatccttgaattttacgtcttacattaaataaagtttgtccatgtcgcattaaatataaagttttttttcctttgttatttctctttcatttttacaagaacacttatagttcactataaatcaaggaatttatgatcttattttaaaagtttgtggtccttttttataaaccaaataacacgcaatgacacaataaaggaaacaaaaagccactactgaaaaactaaataaataaaatggtaaacgcatattcataaacagaaaacaaataaaataagtcaaagacgttataagctgatacataggattttttacttcagtataagcattataaggttgtaataaataatacaaaaccaaataatgggttgaaaagaaaatactcatagaaataattgaaataaaactcattaaagaatacccaatttgatgaattcctaaaagatttaataaaatcacataacctattgcaatcaccaaagcaggaattaaattaatctttatcatttctcttaaacgtatttgaaataattttaagagattttttggttcatgaaaaaaagcataattaagcatacaatgatcacaattaataaacatcgcattggttatatttttcgttgtatttaacatatacataataaaaacaaaatatggtaaagataaaattaaaaaatccttgatattttcttttagactaggcacaacttgtaccccaataatgagtgatataacaactacaagtaatatgtaagtttgtcttttggcaaagcgccaaataattttatgatgacgtttcataaataattcattcatcatttcaaaaccttttttatgactttgagtgatttttgattgatcaatcatttgatgatacgattcctcttgaatttgtgacatacttgcctctaataataaagcgtccatatcccctaacatatccttacacatcatttgataagctggaaacttaaaaatataaacaagtcctatcatacctaaaagtgtcatcataacagataaaataacaacactaaaaactggtaaataaatttgaaagaaaacacaagcataagctgcaaaaaaacaaatcgttaataaaatagtcaatggttttggaatattattgccagtgtaaacacgatgagaatgtaaatacgcatatgaacaatacattcctacaatgattttcattccacaaactaataaagttaaaaccaagcatagccataatggaaatgtaaacataaatgaaatccaatataaaacaaccatattcccaataaaatgtctaatgattgtatacagaaactgagaaacaacatattctcttgcatccatacgcattaaaataattccataatatttgtctttactgacttcaaaaagatcattattgataaaagcaccaataaatgataaaaaaacaaaaatagttagaaaagaaagtaaatcatttctttctattaaaaagattggtaaaacataaaagaatataaaataaacaatttttcctaggaaaatatttataatttcccataaggcactcaggatatttgcaaaagttttcaatccaagatgtttatataaagatgctggtaaaaattttttaataaccggaatttgtttcagtccataaataatactattcacacgataagtattatgtatacgataagcaattaaccatgtctttatcataggctttcatcctttaataaagtaataatcttttcttgaaactcatcatcacttaattcatcttttgaaaccattgataagactccatgatttaataaaacaatctcatcacataaatcaacagctaattccataatatgggtagaaaaaattaaaatatgttcatcttttatttttcttaataactttttcatctcatctgccacaacaacatctaaagaagttaaaggttcatccaacaataaaataaatggattatatataaagttaattaacatttgcatcttatttttcattccatgagaaaaatcttttaaaagacgatctcgatcttctggtaaaatccccataaaatcaaaatactcatcaacagtttttacatcatgaatatctttttgattgatatcaataaaaaattgtaaaaattctcttgctgttaaaaattctggaacagaaggtgttgataaaacataaccaatatcaccagttgtgactttcctttgttcatttctatcaagaatataaaactttccttgatcaataggaagatcttgattcaaacaattaaataaagttgttttccctgccccatttcttcctaacaaaccatagattttccctttttcaaaacgaaaatcaatatcttctaaaacatgtttatcctcaaaatatttttgtaaatgttcaatgactaattccatcatcatacccccttgtaatagttacaagtatatcattttcaatgataaaaaaatagataaaattaaaaatcaataacctattcatcacaacattatatgaaactataggatatttcttaattttattgtataataaagtcaattgagataggagtgaaaatatgtatttagttattgatgtaggaggaacttataccaaatatggttattataataaagagggacattgctttgaaaatggccaatttgaaacaatcaaaacaaatcgaatggctttttatgaaagcttagaaaaattagttcagcaaaataccaaaggaattgctttaagtatgcccggaatcttaaatgcacaaactggagaaatgctagctgttaccttacttccttttttaaatcatcataatattaaaaaagaattacaagaacgtaccaaacttcctgtttcgattcaaaatgatgccaaatgtgcagccttgggtgaaatgtggcaaggaagtttacaaaacatgagtaatgcttttatgctcgtctttggaagtggaattggtggaacaattataatgaatggagaattggttgatagccctcggcataaagctggtgaagttggttgcttattagcaccagaaacacttgattattcatcggtatataatatttcaaagagtgatagtggtgtagccctgattcgtgatttaagccaagcaattggttgtgagcctgatggacaaattgtttttcaaaaactttttgattgtcaagaagcaagacaaatctttcaagcgttttgtcgcagaattgctatgttaatctataatttggattatctttttgatttggatgcggttagtattggtggaggaataagtgcccaggaaatcttaatttctacaatccaagaagaatttcaaaagatgcgagatttacatcaagaagatgatcaccagccaattattcaagcttgtacatttttaaatggcgcaaatttattaggggccttgcatcattatttaaaaacaatagagaaaaattaaaaaggaagatgggcatcttcctttatttaatttctaattgatttggatctaagaattgactttggtgtttcttataagcaacaaaagtacgatttgctatatcaagtgaaatatcgccaattctttccatatgtgataaaacatctaagaaaaccgaagcagagacagaattatcacaaatattatcacacatacgttcaaaatgattctgttgacattctaaaatcaaagcattgagttgttttgttttactattgagctggcctaataaacgtgttcctttgcgagtctcatagatatgcattgcagtaataagcatatcttctactaaagcatagattttcttaaaatcatcaatagccccttgagaaaattgaccattttcatcataaaccattttataaaaatctatgagattattaacttggtcagaaatttgttctaagtgtttaataatttgatagtttttataatattcttgggtttgatcttttgataatgtaggttgttgagcaatttttaatagatattgtgataaattagcatcatatttattaaccaatgcttcaacttcaaggacttcatcataaacttcttgttcttttgaagtgagataatgctgggatagttttatattttctaagacattacggcccattcgcattgtattctttttggcaacagctaaagctgcagcagggaatttttcaatcaattgatcatctaactcatcaatattttcaattttaacccctctagaatcttcacccggtatcaaaagttgaagtaatttcacacattgaccaacaaaaggaataattaaaattgtagaaatgacattgaaaagaaaatgtgcctgagcaatatacatttcaccgcttccaccaatcaaatgattggcaaagttagtcaattgaacaaaaggaatcaacagtagcatcccaagtaatgcgcctaaaacattatatacagcatgaaaccaagctgcacgtcgtgttgaaatagatccgccaatcgccgctagtaaagctgtcatacatgttccaacattggctccaaagataaatgctgcccctgcggctggcgataatgccccagtaacatagagtttttgaacaattccaataactgcggttgaagattgcataatcgctgtagccagtgtcgcccctaacaaagcaaaccaaggttgtttgcctaacatcaccatgatatccataaaccatggttgtttagcaatcattaccaattgatcactcattaattccaagccaacaaaaatcaatccaaaaccagcaacgacttttccaatatatgacattttcttacgtttagccaaaaacatcattgctattccaataaaaacaaaataataagcaaattgttcaatatttaagccaatcataatcgatgtcacacatgttccaatatttgctccaatcgtaattccaatagcctgaacaagtcccattaaccccgctcttacaagactaattgaaataactgtcacagctgaactggaatgcaaaagtgccgatatcactgttcctacaaaaatagacataaagagattacgggtatatttttcaatatattctcgaattcttgttccagcaatactttttaaagcatcactcatcatattgatgccataaatgaatattgctaatcctcctaaaacaattcctaccatttgaattgttgctgcatttaaccaatttaccatatctctcaccatctttctatctctattttaccatagcttttcctttaaatgataaaaattcaaaaacaaaaaagtattttaaacatgatatgtttgaaaatacttttgaatataagcttgatctaaatttaattgttgaatcaattcatctttattatgaaatgacttttctttacgaatgaataaataaaactcaacaacaatcttttctccataaatatcttgattaaaatcaaaaatattcacttctaaagatggtttatctaaagcaataaaggtaggattatatccaatattacacattcctatataacattgtccttgaatataaaccttcactccatagactccattaaccggtaagaaataagaatgataatcaatattagcagttggaaaaccaattgaatgccctattcttcttcctttaataacttcacctttaattgtatattggcgtcccaataattcatttaaatcttcaatttgaccacgttctaaatgatttctaatacgtgatgaagaaattttttcatctttataaataacttcatcaatcacacttacacctaaatctgtatgtttttttaaagttgttgggtcacctgaattacaagctccaaagcgaaaatcataaccacatacaacatgttgaatatgacaattgattaaatatctttctatgaaagtttcaggtgaaatagcagctacttctttagtaaactcaataacaaataaataatcaattcctttatcttctaaaatcgcaatacgatcatccattgaagttaaatacttttcttcagtaatctttcctaatacatacaaaggataatgatcaaaagtcattaaggcttttgcataacctttttcatttgataccttaatcacttcatcaaccaaggccatatgtccaacatgaagtccatcaaaaaaaccaatggcactacataccggttgttctatattaactttttgtccccttaaataaatgactttcattaaaataatcctctcacactttttagataacctttgccatctggtccatagacagccaagacttttccttcacgattaacaacaacaacttgatgatcaatatcacttttgattgtctttccatgaatcacaatattttcatcttcaacttcgtatttttcaaaatgagcaaaagcttcttctaaactcaaaagatgaaaatgtcccttttcaacatcttctaaactcacacagtcctttaaaagaaaatgacctgattgacttctgattaaatgtgacatatgaccaggataacctagctttctagcaatatcaacacaaagagaacgaatatatgttccttttgaacattttacctgaaaacgaataatattatctttttgttcaagtaattggatatctttaatcacaatatcacgtggttcaatatgaacatcttcaccatttctagcatattcatataattttttcccattcaccttaatggctgaatagattggtggcatttgtttttgagcacctaaaaaagacaacaatacttcttcaacgtgattaacaccttgaaattcctttgtttctaatactgtaccactagcatcatatgtatccgtagattttcctaaagaaagtgttgctatatattctttttcttcacttgttaaaaattgcaaagcctttgttgctttaccaacacataaaaccaaaacccctgttgcatcaggatccaaagttccacaatgtccaactttcttagtatgtaacaaacgtcttatacagttaacaacatcatgacttgtcatacccgctggtttgttaattaataatattccatccatcttatcaccgttgtttagtataccataaataaccaagaaaagaaataaagagttcttgtcataagaaccctttattttgcttcgtgataaacatgatttatagcaacatcaaagacaacattagcatttgctaaacttacagtttttccattaattgtcgtacttccataatttgaaggaaatgtaatatcaatttctttggtttgagttgcttttaatcccattaattgatcttcaaaaccaggaacaaattgacctgatccaagttctaataagaaaccattggcacttcctccatcaaaagcttccccttttaactttccaacataatcaatcttaacaaaatcacctttttgacttgctgctttggtttctttataagttttatttaatgtaatatcaaactcacatttctggccagctaaatctctagattgataattctcaggaaatgtgacttcaattgttttttcacttcccactttcatatcaacaatttgttcttcaaatccatcaataaaagtctttgaacctaattctaaaatataaccttcagccgttccaccttgaaaagcttttcccgctaatttcccaacaaaatcaatgtttacaacatctccattttcagctttaacttgagatgtagacgttttttcactttgacatcctgttaataatcctaaacacaataaagcaactaaaattttcttcatatcttacctctacttatgattaatgacataatagtttttcttaccacgtctaataacagtagcaacttgaccaaatgcattttctttcttcacaacaaattccacatctgtaactttttcaccattaactaatactgatccacctgtaacgaattgacgagcttcacgatttgaagaagctgcacctactttaactaaggcagttaagatttgagtatcttcttccatttcaatgcttggaactccattgaagcaagattgaacatgttctaatgttaaattttgaatttttccagagaacaacatttgagagatttctaatgcttcattatatgcttcttcaccatgaatgaaggtaataacttcttttgctaaagctttatgagcttctcttaaatgtggttgtgttttattcttttcttctaattcttcaatttcttcttttgataagaaagttaagaattttaagtaatcaatgactttgtcatcttctgaattgataaagaattgatacatttcatatggagatgtctttttacgatctaaccaaatcgcatgtccatttgtttttccaaattttgtaccatcagattttgtaagtaatggcattgtaaatccataagcttcttttcctgttttctttctaattaattcaatcccagctgtaatgtttccccattgatcttgaccagcaacttgcatatgacaatctttattttcatataaccaataaaagtccatggcctgcataatcatgtaagaaaattctgtataagtaattcctaaatctaatcttcttttaacaatatctttatttaacatgtaattaacgttaaagtattttccatagtctcttaaaaagtcaataaagtttaaatcttttgaccaatcatagttattaacaacttcaaaaccaaataaatcttgagcttgtttctttaaacaatcaaaattatgttgaacttgttcttttgtaatcattggtctttcagtatcaggttttggatcaccaattaaaccagttgctccaccaaccaataaaataggattatgccctgcatcttttaatctcttactaattaaaaaagatgaaaaatgcccaatatgtaaactatctccagttggatcagttccaatatagaaagtcattcctccattatttaatttttcttctaaatctggtgaactgacatctttaatcaatccacgccataccaattcatcataaattttcataatatcctccttataatataaaagagaattcctcccaaaggacgaattctcgcggtaccacctttatttatgtttacacatactctcttattgataacgatgttgccaccgtctaagctttgcacttagatgctccagagtgtattcattatattttgtgacttgtttccaccatccacaagctctctatgacacagcctataactacttgtctccttcaacgcttgaatatatcatattaaattttgaagatgaagtcaacagcaaaatcgaaacatcatgaaaaagtaaagatttccgctaattttgctttcgattcttcaattctatatttatcaacaataataatcacttgatctcccacatagaattgtgtatcaccatgaggaataatctcacgttttcctcgcatgatggaaaccaataaacaacgtggaggtaattttaaagaagcaactgtttgattaacagcaagacttcctaaactcacaacaaaagaaattaattctttgttttcaacataatcagtttgcgttttatttttagttaaacgatgtaataagctttcataaatcggttcacttccaatactatttgctacaatataagcaataaaagaaaccgctgcaattggtaacatcaacttcaatgttccacacatttcagcaattaatacaattccagtaattggagctcttacaattccggcaaagaatccagccattgcaaagataataaaattcataaaatatatttcaggaacccctaacataattgcaagtttcccaaaaatagcaccaatcaaactccctaaaataagtaaaggaaagaaaataccacccggtgctcctgaaccaaaacttaataatgaaaatatgaatttaacaaccaatagaataaccaatgttgataaaacaacattttcactattcaaataactcactaaaacatgtcctcccccaatgacttgtgggatatatagacctaaaattccagaaataagtaacggaataatcactttttgatgagattttaaacaaggaattctatcataaagatgtagggatgtcattgtcatcttattataaaaagcccctaacaatcccgtcgcaactcctaagatcaataaccatccataatcatataaaggtaatgcataatccatagtaaaatgtaatgatggtgataaaccaaaaacattacgacttaaaaaatcacctgtgatagaagcacacataacagaaaccaaagcactggttgaaaaattcttatgaacttcttctaaagcaaacataattcctgctagtggtgcattaaatgctgccgataaaccagctgctgctccacatgtcaataaaaatctttcttcggttttaatacgtttaaaaaaacgtgaaactgcttttcctaccattgcacctaattgaatactaggcccttctcgtcctaaagacaatcccccaacaatacaaagcgttcctgcgacaattttcgcacaaagaaccttataccaacactgatcaatctgtccctgaacttcagcctcaacttgaggaatccctgaaccagaaatatatggttcatatttcaaaaacaaagaaataataaaccctaaaattcctaaacctattaaccacaaaataatatagaagatatttcctttcacaaaagatgcaattgtaaaatataaagattcagcattcgttaataataaacgataaataatcgcaataaaaccagctattccaccaactaataaaccttcaaaaaacaaacgactgcttagtttatttctttcttttaatatatgtagtgtttcagaatttcttttttccattcttttcccctctttcgcaaaaaaacttctaaatccttagaagtttattttgtcgttcctcttggcattaataaatgctgcactggaacttctcttgcatcaatttcttcttcatttaaaatcttcgttaataaacgaacagctaaagcacccatatcataaactggaacatgaatagatgttaaagcaggacgacaaattaaagcatagcttgtatccatcattccaatcacttccatatcaccaggaacttgaataccattatcaatagccgcattaacaacagctacagcttctttatcataacctgaaaaaacaagatcatgcttatgatttttaaaatattctaaaaattgtggataacttttttcgtaatgtgtagatgttggtaaaatttgtttatctttatcaaaagtcatactatgtttttgataagcttcttcaatacctaaaattaaatcttctgttctaataagattttgttttggactgacaaaaacaatatcctttttaccttttgataaatattcatcaacaatatcatatgcaatcttctttgcatcaataaaaattgaacccatgtattcactagaaacacgtgaaccaatgacaacagaaggaattttatatttattaaccaattgaatttcttgttcaatttcttcattattaaataaaataactccatcagctcttgatttcacaactttttcaataaccgtttcaatagggtttccatcaccgatttcatcagttgtatagatactcacattataatctaaacgacggcttgtatcaccaatacccccaatcatatctttaacatgtgcaaataatgattgaggaaaaacaatagcaattgttgttgttttacttgttgcaagtcctcttgcgatttgattaggtttgaaatctaaacgttgaatagcttccatgacacgttcacgtgtatttggtttaacgacatttgagccattaataacacgggaaaccgttgctaaagaaacacctgcttctctagcaacatcataaattgtaacattcttacccataattaatctttgatttcttcaatcatttcttctaatttgtcttcaacatcatcgatttcttcttctaattcatctaagtattcatcatctaatgaagcatctaaaactttagattttacttcatctattttagaattcactttatcagttaaatcaacaacaccttctttaacttgcatatactgatcagtttctttcactttagaagcaaattcttctaattttgcttctaaatcagttaattttgttcttgttgtttctttaaaagtatctacatcaaattcatcaactgattttttcactgtctcaattgtttgacctaacaatgcttcaacatcttctttagtcatattctttaattgatcatatgcttttaaagattctcttttaatatcctctcttaattcactaccttttttaggagccagtaacaatccagcagcagcaccaattcctaaacctactaaaaactttccgaacttcatttctctcacctttcttttctatttttttcttctaaagatagaagttaaaaaccctaatactgaaagtaatccagttttcattgcacctcttgaaaagaaaccacttactaattcaactggtgcatttaacatttccattttattattgacatcatctaaaatatgattcacttttgctaaagttgtttcaacaattgtcattaaaacagttgcttccttcacagctccagacattctaatcaataacaagcctaagcttaaacaagcaaacgcaatactcaatagcaaaatacaataacagactacttgtgcgtccataagttctcctttcctcgactttctttcattataccatatttttccatgaatgaaaagcaagctctattgtgctttataatcaataaccatatcttctaatttataaatatctttactactcataaaaagataaacaacatgatcatattgagctaataattttacagcttcttcatcttcatgaatgacatgtgcacgaggaatatactgtgcaatttcataaatatcaatatcaattccaggttcttttttcgcgttctctgggaaatgaaccaagaatggatgatcagccaaatccattgcctcagcaaactctttagcaaatcttaatcctcttgaaaaacgatctggttgaaaaatagcgacaatttctctacctggataacgtgaacgagttgcttcaatcacataacgaatagctgttggatgatgagcataatcatcaacatagatattattcccaacttccttcactgtataacgacgtttcacaccatcaaatgttgctaaacgttgttgaatataatcagcgcgcatattctctaaatatcctaaagtaatgactgctaatgaattgtataacatatgcattccataaaatggtaaagcaaaatgaccaaacagctcattatgaatataaacatcaaatgacaatccatgatcattattaatgacatttcttgcttgaacatcattatgttcacctgttccaaattttaaaacacgggttgtataattcaaatgtggtaaatgtggatcatcaccccatacgacaactgtatcttttacttgattagcaaatgtctcaaatgatttttcatattgttccatagatttaaaataatcaacatgatccatttctatattattaatcacagcataagttggataataatgcaagaaatgatcttgatactcacaagtctcactaataaaatacttactatcttctaccgcatgaccagttccatcaccaatcaatacagatgttttatcatagtctttaaacaaatgataagccattcctgttgttgtggtttttccatgcgttccggcaattccaatggagatatacttatccattaattttcctaaaaaatcataatacgtatgagttacaacattagggttatctattgctgctttgacttcttcatttgtttcatcaaaagcatttccaataatcacatcataaccatctttaatattattcttatcaaaagaataaattggaattcctctttttcttaattcatcttcaataaagatatatttatcaatatcacttccagcaacatcatatcctaaatcatataatattgttgcaagtgatgccatacctgaacctttaattcctataaaataatacatcatcgtcacctcgcctctattctagcacaaattgatgaaaatgtatgctatctctttatattttttgtgattttttttgcaaattttaacaatttgtttttattgacttcaatggataattccaataactctacacatactataaatgtcaatagaaatgaaagggagataaacaatgagtcaaaaaaattcaagaaacaaccaagttcaaaatcaaaacaaaagtaaaaacaaagggtataatcaaaaccaacaagaaaacagtagttttgatcaaatgaacaacttcaaatttgaagataattcaaatgcaagagcataaaacacgggcaaccgtgttttttcttattatgtcctttttttgaatatataaacaaaaggaatgcgcttttagcacatcccttaaccgataactaacaaatcttttgtatatgaatttaaaatttcacaaccatcttcagtaaccaaaacaagatcttcaattctcacaccaaaatcaccttgtaaataaatgcctggttcaatagagaaaatcatgcctggttctacttccatatcaaaagccgctgaaacatcaccatattcatgaacatttctacctataaaatgtcctaaacgatgattaaagttttcaccatatccggcctcactaatcacatctctagctgctttatcaatatcacataatttaactcctggtttaatcatcgcttctgcaatctcattggcttttctaaccaaatcgtagacttttctttgttcatcagaaacttctttatagaaaaccgttctggtcatatcactacaatacccttgatacattccacccatatcaatcacaatgctgtcacctggttttaaaagtgaatcatcaccttcgtgatgtccatctgccccatttgctccataagcaacaattggttcaaatgaatttcctgaacatcctaaactttgaaaaatcccagcaacttgtttagaaacttcaatttcagttaaatttcctttggcacataattgaatcacttgatcaatagctaaatcattaagacgactcgcttctcgcatcaattctttttctttttcctctttaatcatgcggacatgatcaacacagatagatccaagttcaaaacaacattcatcattagaaagttccataacccgcattaaaaatctcgcttcccagtttttatcaacgcctaccacattggcatcttttaatgcatcagcaaccaatgctggtccatcttctgtatccgcataccaaacaagattcatttgcaaatcttgatctaaatagaaaagtttatttaaaaacatcgtatgattgccatctaatgataataataaaacaaacattctttcaccaggatgattgttatatcctgttaaataatcaattgagctaggatcactgataatcaaatgatccattcctcgttcactcatttcatctaaaactttattcactcttgcttgattcatctttaaccactcctattcctaactcatctaattgtgcatcagccactggtgtaggagcttttgacattggacaagtggcacttgtatttttagggaatgcaataacatctcttaaagaatcacaaccacaaagtaacatggcaattctatctaatcctaaagcaaatccaccatgaggaggtgttccatattgtaatccttcaacaaaccaaccaaattgtgcatcaatttgttcttgagtaaatcctaaagctttaaaagctctttcttgtaagctttgttcataaattctttgagaacctccacctaattcaaaaccatttaaaacaatgtcataagcatctgctaaacagttttcaggatcagtttccatcttatcaatatcttcatctttaggtcttgtaaatggatgatgttttgcataatatctttgtgtttcatcatcatattcaaacattgggaaatcaacaacccataagaaatcaaatgttgatggatcatataatttcaattcttttcctaaataattacgaatcgctgctagtgaatcacaaacaacttcatattttacatcacttacaaacaacaataaatcattttcatgagcattcatagctgttaataaacgctgcatttgttcatctgtaaagaactttgcaattggtccttgaacaccttgatcagtgacttttaaccaagctaatcctttcgctttataagtttttgctaagtcttgtaattgatcaattttctttctagagaagttattggcttcacctataacattgattcctttaacatgaccatgagcttctaatgcacttttaaacactgcaaaatcaacatctgcaacttcatcatttaagttcacaagttctaaaccaaaacgtgtatcaggtttatcaataccatatctttccattgcttcatgccaagtcaaacgacgaagcggtaattcaatatcaatacctttgacatcacgcattaattttgcaatcataccttcaccaatttctaagatttgatcagttgacataaaactcatttcaacatccacttgggtaaattcaatttgacgatcagcacgtaaatcttcatctctaaaacaacgagcaatttgataatatttttcaaaaccagaaaccattaacaattgtttaaacaattgaggagattgtggtaaagcatagaattcacctttatgaacacgagatggaactaagaaatctcttgctccttcaggtgttgaacgatttaaataaggtgtttcaatatcaataaaatctaaaccatctaaatattctctaattgaacgtgtaattttatgtcttgtcataatgttttgttgcatcactggacgtcttaaatcaagataacgatattgcattcttgtttcttctaaggcatctgtttcatcagccacaatcattggtgttaatttagctgtattgacaattgtaaattcttttgcttgaacttcaatttcacctgtaggaatctttggattcttagatgatctttcaataacagttccttttaccgataaaatatattcatttttaacatcttttaatctttcttcaaaagattcatcaaaaataatttgtgtaatcccataacggtctcttaaatcaataaaaaccaaagctcctaaatttcttttcttagcaacccatccaattaactcaacattatcacctacatgagtgatccttaactctccattgttatgtgttctattcatgatcatgtcctccttcataatgttcttcaataaacgcaacaatattttctaaaggaacttcaacttgttctttagaatgattacatttcatattcacaacttctttttgaacttcttcttcaccaataatcattgaaaaatgagcatggaaacgatctgcagacttaaattgaccttttaatccacgatcacaataatccatatcgcatgtaaatccattagcccgaagcattgtcacaatttgcatagctaaatctttagcttcagcacctagaggcataacgtaaacatcaataccttcttcttcctcaaaacgatcacccatcgcaatcattaatctttccattccaaaagcaaaaccaacgcctggaacatctggtccaccaagttcactgataagggtattatatcttcccccacctcctacagtagaacctgcacctaacttcggatcatcagaaataacttcaaaaacagtatgcgaataataatctaatccacgcacaagatttgtatcaatcacatattcaatttctaaatcatcaagtaattcacaaactttatcaaagtgtgctttagcactttcacttaaataatcaattgtgtgtggggcattattcatagctggatgatctttatccactttacaatctaaaatacgtaaaggatttttttcatatctttgttgacagtcataacataaatcatttaaaactggtttaaaatgttctttcaaagcttcacgataagcatttcttgattcttcatcacctaatgaattgatatgtaatttaacatcatttaatcctaatgcttcaaccacagtaacagctaataccatagcttcaacatcaacatatggtgattctaaaccaatcatttctacaccaaattggtggaattgtctttgtctcccattttgtggtctttcatatctaaacattggacccatataataaagtttttgtaatttttctggtaatgcatacattttattttctacataacttcttgcaattcctgcagttccttctggacgtaatgtgatggaacgtccttttttatcttcaaatgtatacatttcttttgtcacaacatctgttgtatcaccaactgctctactaaacaattcagtatgttcaaagattggtgttctcatttctttaacgttgtagtttgcacagattgttcttaatagttgttctaattgttgccattttcctgttgcatcaggtaaaatatcaactgttcctcttggtgcactatatgccattttcttttcctcctttaaaataataaaaacgtcctatctaaggacgtttatttacgcggtaccaccttagttcatacatagtatgccctcatgtcttaacgcgactcacggttattttcataacatcctccaaagtgtcccatagctgcctctcattgttttcaccaaccacaatgtctctaaaagatttcactatttaatcttcttcatcggaacttataagaattataaaggattcttccctaaaaatcaactcttattcatgaattctttttttaatgacaaaataatttcatattttaaatcatctttatttttcaatcatttctaaacaacaatgatactgaatatcttttgacaaaaacaataaaaatcaacatatccataacaaatataaaaagcatattcattataattactaaacatatcaacaataaattttccattgtcatcaaagttaaaaagaaactcataataacacttaacaatagtgcacttccacccatgattgtcaataaaatcaattcttccagtgctttcatcttcatcaattgataataattcacgcctaaagtttccaataatgcaatatttcttttatcctctataacacgatatgtattataaacaaaaagtacagccaaaataataatccaagcaacgattagatattgggaaccaaaaacttgtgaaagacgcacttgactgttaatatcaggtgttgttaaaaattgataggatgattctatattttgagaagccatttgataatccgagatagaattgatagatacaacaagccaaggtgttggcgtatttgataactctatgccttgttgttgataatattcctctatcatatcatatggaagataaatcgcctgttcatgatcataatttggttttagcacagcatcaacttgatcaaataattgtccttcacttatcaaatgagaaaagacatcatcttttaaataatgataaatttcataagtagcataaatatcagaggaagataattcatgttttttctttaaaatatcattatcagttatcattttttcataataaggtttgattgttattgaattcaatttttgatgcgtactttgtaaggatgaagtcattattgcataaggataaatagataaatcaggtaatgcctgttttaatcgtgtttgttcagtcacactgaatggtttctcatcctcttttaatacaatcccatagtgatgaatagaaagcaacaaattcttttcatcattttctttcaataaagtcccatatatcaaagataatgcaaaacccattaagacaagacctaaaacaatcccagcaaccatgccataaactttgctttttttcaaactatattgatataaaactttttgatttattgagtaatcttgaaatggttttgattctatttgatattcagatatttgacatgcagataaattcatatctttgatttcataaatttgatcagcaatctcaacaaaggcatcatcatgtgaagctaccaaaaccatttttcctttttgataagctaaattttgaataatagaaataatcttttgcttgttttcattatcaagataagatgttggttcatcaaaaataaatagttttgcatctttaactataccacaaacaatcgctaatcgctgtctttcaccacctgacattgattttaaagatgtttgaaaatccagatccaaatcaacaaaatcaaggtattcccttatttcttcttcagatatttgtcggtgaatcaaatgagcatagaaatagatattttcaatgagattaagatgttcaaaaagataattttcttgaaaaataaatgagatttcattttgtcgtagataacttctttgtttttcatgacatgtgttgatatcgattccatcaaacagataattcatctttgcttgatgtgctaacaaaccaatatccattaataaagatgttttaccactaccactttcacctcttaaaagagtcacttgctgataaggtatacacataccacctttttctataagttgtcgtttaccaaatgataattcaatattcgttaactcaatcatatgtcataactcttttccaaattaaatgataagaaaaatatcccattcctattaaaaccaaaagataaataacactgattcctatccatgatacaaataaaatgttcattgcaaatattccaccacttatcaatgtcaatatacctaaggcaagaattgatgccaataaacatatcattgagaatatccaaaaatcttccatataatattttttcatgattctagataatccttcccgtcttaaaagctttaattcactctttcttaaatacaattgataataacttaataaacaacaagccaaaaccatactcatacatgcaaataacataaccaaatttaaagaatccatagttgttgtggcaccccaataatgataattatcttgaaaacgaacacgataaagttcatttgcttgttcaattgctaccttcacattatctttttgatcttgcttgcacataatcaaataagtcattggatgtttataaatatgattttcacttttggcatgacttttcaatatttctcgaacttgatctacaggcataaatatttttacatagttaccctctgtactactatcagaatcactatatacatcactatttaaaacaccattaaattggattgataaaggacatttttcatccttaaattgatattccctcaattgaccttctaccccttcaatggtcgtgtagtgttcaaaatattctgtaggtaaatagaaatccaaatctaatgttccaccctttgtcacatcttcatcaataagttcagcaaaattttcatcaatatatgttccttgtatatctttcccattcaattgaatatgttgagttgaatcatatgaaaagataacaattttcgcataaaaatcaatacccaaatttttactttgacgaggccaataatatgagcatttctttttcactccatcttttgaagtcaatataaactctctaccttcaccatgatgaaaatctttaatattataataaggtgtaattgactgaacatcagatatttgttgaatcatttttaaatcttcgttttcaataaaatcataagtttcccaatctaaatacctagcatctggtaacttataataaatcaagccattatgagataaagaattctgatattctgttgtctgtaaattcaacgttatcctttgacttaatgaatacgatatgaatacagtacttaatactccaataacgataaaaataatatataatatcttattctttgtattcttatatttaaagtaatgaagcttatttattttttgataagatttgtctttattcttctgaacaacagacattgtcttttcaaaattaatttgataattttcaattttacaaacctgactagctgcttctaaaatcatttcatcatgactagtacaaacaaccaaaacatctttcgataattcttttaaaacttcaattaacttttctttgttttcagtatctagtgaagctgtaggttcatccaaaataagaatatcttttttcatcatcaaagccaaagcaataagaaatctttttctttgtcctgttgataaatatgatggatatttctttatttctatattttccagatgaactttatctaaatatttttttaccaattctttatcaattgataaatgatgtaatctcgcatagaattcaaaatgttgataaattgtcatattttttaaatattgaccatcctggtcaatataagaaacatgataaaataaaaaatcatctttattgttttctgttatttcttcttcattataaaatatttttccttcctgcataggagtttcaaatgttaatagatttaacagcgttgtctttccgcttccacttttcccatgaatgcagaaaagggaagtatctggaaaatgaagatcaacatttttaaatattggtttatcataagataaacttacatgttctaaccttaacataccctcacttccctcttgtgtttataaaaaaggtggtaatatctttcgaatactaccaccactataaagaagaaatattatcttctatgcaattgatttatatcaatgtcaataacaacaatactttatcgttgccttgcttattataaacaactcattccattataagctcattcctattatttttctctttttacatttcttacatatcttagaaacacttataacttcatttcattatctctaataatctcatgaaggattctataaagcaattttactatgtctttttctactcatttatatcaatcaatctcttatcaccttccgtttaattcatatttatacacgctaacttataaacttttcttaaataatatgacatatctatatcctatattttttactcattttataaatcttcattttttaaatattttataaactatgattgatataaattttcttattcacccattaaaacctaactttaagatatcatgaactttttctatatttaaggccttatttctaggcctaacgtatgttagggggtagtaaatctttaaccaatcgataatcttttttaagattaagattcgttatgaaacttggtcttaaatataaagtttttatttttctattgtcaaacatctttaagacctcctttcaagtcctttccttttctacacctatatcatagcacaattctaacatttttgaaagccttttcattttcatattttgaaaatgctattttagatatttcgcccatatattcaactctttttgtgctgattcatgtgaatcagaagcatgaataatattattgactagacgatattcctggtttgataattcataactatcttggctcatttttcctctaattgaatcaggatcagcctctttgggattggtttttcctactaattgacgtgaatatgaaatgatatcttctttaccttcataacttactttcattggcataatgtaatgtggtccatcaaaataaaatgtattaaataagcgcgcaggaaaattaaatgttttccctttatcatcaataacttgatgatagtgttctaataatgttttcatgacatccatatctactttaatttcttttgctgattcaatttttaaaccatgatcttctatcatttgtagaatcttatctttcttatcattttcaaaagcatctggttttaacatcatatatgtatattgtttcatgatttcatcctcttttccacttctattataccaccatcaaatataaaatatgtcaaaaaaagaaccctatagaaaatctggttcttactcggttatgggtagaataactatctaaacagtacaagaaattgtactgtttttttgctttatcaagtcgactagtttgaaatctgtattattcattaaaaatggtacataacatttcttaaacaggttgactaatttgcttcttccatataaaatacgtttgaggagtttgaatttgttgttgttaccttcaacaaatccagaactatatgggaaggatattgcgttcttgatcggggcaatatctttttctattccatttataaatccattaactttggaatctctaaattcattaatgaatttatccagtctatctagagaagatgtccccattgtggcaataagctttctcttgtcaggtctcgcagtggctttgacgtctataaatgtccaaacaagaattgtcctcacttcaagtcagaactcaagaaacttttcaaagaagacaagaagaaatataaaatgaatccttctcagttttctcttcactatatcactcgtgtctttaatgcatcgctggacaagcttgagaagttccaacataaaatagaaccatcaaaaatagatttatcaagaatccgcaattccaagcatatcctcggtcttgttttaacatattacatcaactatggtctttcactcagaaaaaccgcattgatcctttatgaaatccatgatatcaaaatatctcatcagactattgccaactatgctcaggctgccagtcatctcctttttccatggatggacaactataagcataatctcaactcatatcaatgtggcgatgaaacctatgttaaagttctaggcaagaaagcctatgtcttcttcatgtgtgatgtcaagaagaaaatcatcacttcttatagaatctacatgaaacgtgacacattcagtgccattgatgctttctactcagtccttagaaaattcaagaaaataccagaggatcttgaattcgttgttgatgggaacccaatctataaggcagcacaacagtatttccaattaaaacgcatcttttttaaggtaacacaggtcattggacttacgaatgatgatcctgtatcaaagcaacatcgtccagccaaaccaacatattaaaatatattgctattgttctattttttattattacatttcaatataacttgtgatataacaatactattttccatcttaataaaaaaactaccatcatatttttcagcataatattgaattatttttaaaccataaccatgtcccacagttttttgagtatttaaacttaataccctatctgttgtattagtaactgtaattaataatgtctcatcattttttattatttgaatatttacatttggaaatgctatatcaatgttttgacaagcattatcaattagattaaacagtattgttgaaaaatgtttctcattgatgttaatataatcaacacttacatcataagaaaatctgattgaaggatattgattttttttcaaattaaatataatatcaattaattgaatattggtcgttggttcaaaaacttttatgtccgtaatatctgtatataaatcattaatatattctttaacatcatacaaattattcatagtttttaatatttgtaaatgattttttatatcatgttttacttccattactttttcattttcatttctaaaactatctatcattatttcaacattatcgtcaaagatatttgcaattgaaagattttcattatctaattgaagaactattgatctatttaaaaagtaaagcaatgtaatccataaaattacaaatgtaaaaaatataaaaacaataaaaggtatatttagttctattaaatgtaacccaaaaaaaatcaaaaaaacaaaaaccgtaataacatttattacattatagactatacaattttcttttattaaaatttcagaaggtatgatttttaatctttcaagcattttgtatagaaaataactgattattaaatataaaaaaactgaaaaaactctaaaaccataattggtatacgttcctaaaatattaatattgaccaaaaaaaatatatatgaaaaacaatttattgtaattgaatacacacaaaaaagcaacttgtgtagaataatatataaaaacaaagtgcattattatatatgcaaagcattataaagtcacagagtattactaaaatatttgaaattaaataattatcaaaatcaataatataatctcccgtaataaaaaaattaattagagcatatatacataagaaaatcactgtatatattttacttctttcttgatttaagtacggtttaatagttatagttaaacataaaatatataaataacagaaaaaatactcagataataatctcatgttttttctccaaaaaataaacgtttttaacttcttttagacgccttgcacttatttttaaagtatagtctaaatctcttaaataaagattgttattatcaattccaattattctatgcttattgattaatatatcacgatcacaaaaaataaacatatcctctaattttttagataattcttgaattccataacctgtgataatgtaatcattcttctccagcttaatacaaattgtttttcttcttatatattgtaaatatataatatcttttataaatatatcgacaacacctttatcacttttaacactcatggttttttcttcaaatatttgttttattatacttttaattgtttcaagaaatatttcttcagaatcagatttttctataaaagcatacacattctttccaaaagcttttttcatataaaaatcataggatgtcataaaaacaatattttcagttaaattattttttgcaaaatccaatccattttcatcaatgagatcaatatctaatataattaaattaaataaaactttgctgcattttaacgaacttgtatcctcaaaagaatatgtattaatttcgaactcagatattttacttaatctttggactattaactctcgatattctttttgatcatctacaattgcgatattcatatatatttcctccttgtttataatcactaaagcaaaggatagaaaaaagaactaatgaaaaaaaaatcaatataattgacttattattaattctagtccaaatctcaatgcgtttttatctttaatttttatgattcctttttctacaaaattattaacaattatttcacaaattttactcatatttacccctcattctacataaatattttaaatattatatcacaacaaaaatattattgtaaatcaattttcagcatacgaaaaagggtgtaagaaagtaagtctatttttattaagttttaaattagtatgaaactttttaaacattgtattcttaattatacttaacacttcttttagtttaattattttatttataatttcatttacatatatatttgaatttgataaatacattctcacaaataataatcttatatctaaaattaatctttgaaattcaaaaacaaaatcttccaatatacgtttattttctctgctactctcatccattaaaatattaattaaattcactctacaagctaaataacctcccgaaaaaaaagtagagttcatttcagcaaatatattcttatcagtattttcttttatagatttgataaataagtcaaatttcttattataattttctaaagaattaggaatagtatttgcaatttcttttgtagttatattctttttcccttttttttattaaaaattttatatacatatacgtcatctttatatattaattctaaattttctaatttactctcaatttttattggttgtatcaaaggaataaacgaatcctttaaataaagctctttattcctttgtttcacaagtatgtagtgatactttttctttattttattagatacttcaaaaaaatcatgataatttaaataggataagggtgaatgaactataatcggtaaatcatgttctagattttctttatttatttcaacaatacaatatcctaaaaaagataagccatctttcattatatccataatgggtgatataattgctcccgttttttatcattatcaatttttaaaattttttctgataaatatagcgatttttcttgaatattcttatcacaaaaatattcaattaatgtcccactaaaacatgaggtatataaagaattactttgtttattcaatacgtatcaaacgctccttcccttctaatgatttttaaagctctaccaaataaaaaagaaccaatcattatccaaaataaattaatacatatatatcctaaccataattcccaacctactgttaattctagatatatttttctacatatctctattcccaaactgtatggtattaaagcgacaataatattatccaatggcttcattacatttgatataaatattagtaatgtttgaacaattaatattaaactacttgattttttctctttcaaaacaatagtgcttaataataatcctattccatacataccaattattgctggtatatttaaaattattgaaacaaaaaagaatacaatatctctaattgttaaattagttaaaaaaaacatcaaaataataagtgctaatataattaaaaaattcgttaataaattaataattaatttaataaagtataatatttgtattttaaaactactttgcattttttgctctaaaataccttcgcttgcttccgaagaaactattgatgtagaaaatccaagtgctaatgaagaaaactgccaaaacaaaaaaccaataaaaaacaaaatatttccatcatttgaagatatatcataatatatctttaatggtgatccctcattaaagaaaaatgcaatcaaaaacacacctactatcattataaaatcactgatcattcctactttatattgcaatctggataaaaaagtaatccttaattctattttaagtaattcatagtattttttcattttcttctccttgattttctataaaaatttcagttaaactatctacctctaattttgaatctattgtttttatgacttgacctttttttaaaaacaaatatcttgtgcttatatccgccaaaaaacttaagtcatgcgatgatatcactaaaactttccctctttttttagacatatctattaagatatcttttattaaattaatattctctatatctaatccctctgttggttcgtctaaaataagatatttacaattacaacaaaaaacagctaatagtttaactatttttttctgacctgtagataattcttcaacttttcttactaactcattttcaaatttaatatattttaagtaataattaagattttctagtatttgctttttcttagttcctttcaaaattccatagtaaataatattatcttttgctgtatttttatatgacaaatctctttcatttgtggattgatatgcaacattattatgagcccattctaaataatcagatttattttcattattgacatgtattgatcccccatttatatctaagataccactgattactttcattaatgttgtttttccagcaccattattaccaaccaatgcaacaatctggttatcttcaagtgaaaaattaatttcttttaatatacgatgtttttttatatccttttgaatgtcttcaactattatcatatatgcctccataaatttatctgattttcttctttaactatactatttcaaaacgtaattactattcctatctttcacaaaaatattcaatcatatgattatatattgattcaaattttccattgattaatattggcttacctaatcttttatataatttttccttgacaatttcaatttcaatatctgataagttcttttcttctttgtcaaatattacccaatcgctatttttttgatacggatataaaatcaaagctccaacatatgaatttagataattttctaaatataaaatagtacgtttaatgaaatttatatcatcattactattaatgactaaatatatcaaatccggttgactagctattagtaaagattcttgttcaaaagaaagaaaatttaaattattaaaagaatatggtattgtctgtgattgagtccccaaaatcattatctcactatctttttctattgaggataataacttattatatgtcaaaatttgtttataaatattgccatttaagtcaataccatagccagatggaaacattttatcaaatccaaaaagatatgaagatggttcggttccaaattgtgaaaacttatacccacttttttttaattctcttcttaatccaagttgcaaagtaaatttcccctgtcttggtgatgtcccacaaattgcaacagttggtattgataacacatttaaacttccaagattattatcaataacactaaaattcttatataattcgttagaactaaatacatttaatccagataaaatatttctttttaccaagtcgttatacttttttaaatcgtcaaaacaataaatattttttctatttaaataacaataatctaataaatatttagtataatcataattaaaaatttgatttattttatctaaatgtccaactataagggtatcaaaatcattatattttgatatttgatttatattaaagagtttaaaagcacccaaaattcgcttattgtttactgttctctcattataataattattaacatcaaaaatatattttatattaaaatctaaaagatctttattttctaacaaaacaattgtttccttatttaacggaaatatagcagcatcatttatatagtcaatatttgcattttgttcaatactttctatttcgaattccattatattgatggcatcctttttcaattgcttaaaaatatcttcaaactgataatttaagtttaataaatctaatatttttatcgtaatgtatggcgatgcaaaactcgatccgcttacatttttataatttccatctttccatggtaataattgtttgccaccaaatcctaatatattaatattagaattatttagaacaatataatcatttatttttttacattttaaagagaactgaactcctattacttctggaaggcaagcgggatatgaaattgccccctcattatcaaaagaagatacaataaatattttttctttgtataataatgaacatattttttttatttcttttttcatactcggacaaattattccactacttatatgaatcaaatctatatctttcatattcatatatatatatatatataataatgtatcatataatttttcttcgtttgtaaaagaatttttcccatatatatttactgtatatatttctgtattatattacaaaaaaaaaacgtttttaattattatcatcgagcgttaaaaaattatcatcaaatgtcgttttgacataataatattatttatttttgttctaaatatatatttcttttatcattctaaactatattcaaaaaatattataaaaaaagatctgtaacaatatatttatgagtaactaaatatatcaggggattttttgagcacttcattttattggggtgctctttcctttcactttattgctgatttcaattattttggggtagatactctgttttccttttttattattcttaattgttttattatttagttataaaatctacagaaagataaaaggataattatctcccctccgacagttcgattaattatcctgttccattgaacaatacgataataataaaattaaacaaaaaaatcaagtctattaatcaatttagttatgatgaaatcattaattcaatcaattttcatcttatacattgtccaaactgtcaattatccgattggtcaactcatgcctactattctagacacgttgatttttttaatcgtcgtcatacagttcgcatactcagagtgaacaggggaaccacaaacaggacaaatatcatcatgagatgttgcctttacataaatagtaactgtatcgttatcatctttccagtcataaacaatgaaatcatcaccaaaaagtttttcattcaaatcgatcttattatatttcataaacatcaccattcttacatctctattataccacaatacccaaatataagaaataatatcctaacaaaaaacagtacaatttcttgtactgtttagatagttattctacccataaccgagtaagaaccgaaaatctatagtggttcttaatgaataactcttttaatatcataaataccttgaatcttatttaaattatcaatagtcaattgtagcagctcagcattttccactgataaagttaacttaatatgcgcttccatatcttgaataccagcattaatatttaagatattgactttcacttgccctaaaacagtaataatatcattcaataaattaggacgatccaatccacatatttcaatatcaactttaaaacgtttttctgtgatattcgtataatcccaataaacatctattaaacgacctttttctgctcctttgatattaggacaatcagctctatgcactttaatcccttgtcctttagaaacatatccaacaattggatcacctggaataggattacaacattttgataattgaactttcaaaccatctacgccactcacactaattcctaaactaccatttgttcttttttgattcttaatagcgttattgtttttctttaacatcttagaaagattatcaaagaagccagtatgattaggtgcaactttatcaattaacgttgcagccgttgcttgtttttttccaataactaacaaaatatcatcaaaattctttgctccaaaagaaccaaaataagatttataagtttctggatctaaatatttcttttcatctaattcgcgtttacgaatttcttcttttaatagttttttaccttcttcaatcgcagctttttgcgtttcagcatctttctttgtaatatattgtctgatcttattacgggctccagctgtttgtacgaacttgagccaatcttcactaggaccagaatttttatttgtttttatttcacatacatcaccagtttttaactttgtattaataggaaccatcacattattaacaattgctccaactgcatgatgtccaacttcagtatgaatacgatatgcaaaatcaattggtgttgccccatttggtaattctacaattttcccttggggcgtcattacataaacatttgcttcaaaaatatcacgtcttaatgaatcataatattctttagcatcaccatctttaatttcatcacttaaagtaataaaatcacccaaccattgtaacttatcaacaatatctttttgttcttgtttagatgaatagtcttttccttctttataacgccagtgtgaagcaaccccacgttctgcaagttcatccatttcttcagttcttatctgaatttcaaagatatgtccaccctcaccaatgacagctgtgtgcagtgattgatacatattaggttttggcattgcaatataatctttaaaacgacctggcaatggacgataatggtcatgaatgatacctaaaacctcataacatttcattttatcttgtaaaataatacgtaaagcatttaaatcatagagttcatcaaaacgtttatgtttaataaccatttttttataaatactataaatatgtttagcccgtcctttaatgcgatatttgatatgatgttcatctaataaatctttcactgattgcatcattttatcaacagactctttacgttcactacgtttttgttctaataaatcagaaatttcctgataggctttgggatctaaataatataaacataaatcttctaactcaatacgaatatcattaatacctaaacgatgagcaatcggcgcataaacttccaacgtttcacgtgctatacgttgttgtttatctggacgcatatattgaagggtacgcatattatgcaaacgatcggctaatttaattaaaatcacacgtatatctttagccatagcaatatagattttacgatgattttccgcataaatatctgattcatccttaaataacatcttattaatcttagtaacaccttcaactaagcttgtaatctcctcaccaaaacgttcaaccatttcttcccgtgagacatcacaatcttccatgacatcatgcaataacccagccgcaattgtggttggaccagtttgtaaagttgaaagaatgtatgctacccaaataagatgaatggtataaggttccccacttttacgtttttgtccctcatgttttaccataataaaatcataagcatttttaatcaaatcaatgctttcttttttggtaatataagttgaacagattgctaagacatcatcaaatgtcacttgatcgtgttttcctttaatttccataattcttcctcctttacaattatgaaaaaagagacaatgtctctttttaatactttaagacagagtaaacatcatatcccgttaaaagttttcttccttttaatgcttctaattcaattaagaaagcaattcctacgacgtttccacccatttgttcaattaatgataccgtagcttgtactgtaccacctgttgctagtaaatcatcaacaatcaaaacattttgtcctggttgaatgctatcactatgcatttgaatttcatttgaaccatattcaagatcatatgattttgtgacaaccttacgaggtaacttaccaggttttctaactggtacaaatccacaatttaattctgtcgcaacaggacatccaaataaaaatcctcttgcttctggtccagcaataacatcaacatctttttcttttgcaaattcaaccaataaacgaatcgcttctttataggcatctttatctgctaataaaggtgtaacatctctaaaaaggacacctggttcaggaaaatctgggatatccgcaatatattcttttaaatccatagctgaaaagccctccttgtttatctattatatcaaattatttgatatttataaagattctatataatatcttttatcataaaattaatatttctttgatttctaaattcattgatttgtaaagttccaactaaattaactgttttttgattttttaattgttcatacatatcaccatgttggaaaaacaaagcagagagttttatatttgaaaattgaatatctaattttaaatgctttccttgactcaattgataaacttgaacaataggagcattttttaataaaaagataggttcttcattagccattccaaatggttctaataaagctaacgattcaatattggcaacacttatatcatattcatcaattaataaaactgaagttgttgcttgtaaagtcacatcttttaatttttcttcaatacaatgataaaaagattcatagtgtgcttcatccacagcaaatccaccagctaaagcatgcccaccataagttacaaattgttcgctatgtgttgtaaaaaattcatgtaaagaaaaaccatcaacacttcttgcactccctttatagataccagcttttttatcataatgcatcacaaagctaggtcgttcatattgccttgtatatttacccgcaattaaaccaattaagccttcatgaacatcttcacttgcccaatacaagaaatcattaccagcagattgatgtgccaaactatattgttcatttgtcattgcttgacgttttgcattgatagatgtcgccatttgtgagactttcatcattaattctcttggtgcatctttcataaagtattttactaaaatatttggtggacacatttctggcaagcgtccaaatgaattaatctttggcgcaattgtaaaaccaattgttgttgtattgtaattcttttgatctcctaacaacaattctaaaggtaaatatttttcttcattcataaaagttaaagctttttttactaatgaacgattttcatcaagtaaaggcatcatatcagaaattgttgtaattgctgctaaacaatacaaatatttatcttgtttttgtaaaagagcactcgctaatttataagctacaaaccctcctgatatttctttaaaaggataatcaggtgatagtttcgtatgaataaatgtacaggcatctggtaaatcagcatcaaattgatggtgatctgtaataataacatcaatacccaactcatttgccctttctacggcttcaaatgccttcacaccattatcaactgtaataatgagtgaatagccacgttttgccatttgttcaacacgttctatatttaagccatagccatcatcaaaacgattaggtatatgataacctacctgtacccctaattctttaaaggcttgaactaagattgttgttgctaaaataccatcacaatcataatcaccatagatacagattttttcttcattttcaatggcttcatgaattctttctaaagtcatatcagcttcttcaaataaggaaaaatcatgatagatgagccttggattcataagtgaattcattgttttttcatcataatgacgactctctataatcttagctaataatgagttgatatgatattgattttgtatttcttgataattttttgattctattgttttatattccattatattctccttaaaagaaaaataactgttgaacagttatttcgtaatcaattcactaaaatcatctaaatttaaagtcgatgcttctttaataaccttcaattttaaataatcaaagacttccgaaaaacgtagtgacataatatcatcaataatatcacacattgatagagcatctgtattcttccatttaatttgatataaatattctttaatatcattagcattaatttcttgaacaccttcacttttaaattcattagcttttatacgaattaaaaaaagaatatctaaaggcaagttattcttaagattgatttccatttattgcacttcctaacatatttctcataaattcaacatatttattataaaggaaattcatcaataaaggaagtgttttatgaaaagaaaattgattaattcatttattatcttaagtagtagtacattaattaccaaagtcttttcggtttttaacagaatgatgttagctcgtcttttaaatgaagaaggtatggctttatatattttagttattccaacactttctttatgtatcactttagctcaattttccattccttcagcagtttttagacttgtttctaacccaaaatataataataagaaagttattatttcagcaatattgatttgttttttatcttgtttattgattatgtttggtatcctctttttttcaaaaatgattgctgtggattttctaaaacaagatcaagcttattttccccttctagctatgcttccttttattcccttggttggaatcagtggaattatcaagaattattatttaggtaaagaagatgtctggacactttctgtttctcagttattagaagaagtgacacgtattctttttacttatgtcatgattaaattatgtgcgcatttatcaatgacttatttagtcagtattgcgattgctgcgatgagtgttggtgaattatgttcaattctatatttatatacgcatatgcatcgtcgggttaattttcgttatcattcattatcttattttcaggaccattttatttttaaagatatgatgaatattgctttacctttgactggttcaaggattcttcattcctgttataattttattgaacccattgttttagtagccattttaacaaaattacaaatgagtgaatctcaaattcatttacaatatgtaattattagtggttatgttatttcaatattagtcacaccaacattctttaataatgttgtcttaagattattgttaccaattttaaataaagatattgcttatcatcattatcatcaattacgtcaacatgttatttatgggattattgtttgttttttcattagtttaccttttaccttattattttatttcttaggtgattattgtttattgtttatgtacaatacaaccaatggttatgaatatttaaaatacatgtctattccttttactctcttttatcttcaaacacctcttagtgctactctacaggcccttaataaaaataaagaaatgtttgttatgagtactttagaagtcattattgaatttatttgtttactcatcttaactcctcgttatcatgtattaagcgttgctatggttatgcttattggattatttacaactttagttttatcatctttttatgtctataaatcggtctatagttctcatcatctttcatagaaaaagctaatcttactgattagcttttttcatcaatctctatctatagccattgcctttttcaaatcatcataactcatatcttgaacaaacaattcatgaaaatgtttcatttgttgtggtgtgcattgcttcaaccattctccactcttatgatattttgtttcaatcaataaaatagctaattctatttgcccttcttttcgaccttcttcaagtccttccttaagcccttcttcacgtccctcctctttatttctacttattttacttcttattaataatctttcactctcaatttcatagactttcagcagttcatcactattcataaatatattcatcctcaatttcaataagataaaacattctttttcaaatcatcataactcatatctcgaacaaacaattcatgaaaatgtttcatttgttgtggtgtacattgcttcaaccattctccactcttatgatattttgtttcaatcaataaaatagctaattctatttgtccttcttttcgaccatctttaagtccttcttcacgaccttctttaagtccttcctcaagtccttcttcatgtccctcctctttatttctacttattttacttcttattaataatctttcactctcaatttcatagactttcagcagttcatcactattcataaatatattcatcctcaatttcaataagataaaacattctttttcaaatcatcataactcatatcttgaacaaacaattcatgaaaatgtttcatttgttgtggtgtacattgcttcaaccattctccactcttatgatattttgtttcaatcaataaaatagctaattctatttgtccttcttttcgaccttcttcacgtccctcctctttatttctacttattttacttcttatcaacaatctttcactctcaatttcataagctttcaacagttcatcactattcataaatttatcgtgaattttcataacacctttcaccaaatcacacatctcactaaatttatgcggctgattatacatccataaataacttaattgttccattggttctaatctttgttccatatcatactcctcctttaataattgtaattgtaataaaactgttttaacaacatctcctcgataaaacaaatgatttttaatatctcctttttgaatataatgaatataaccatgataattatcaatcggttgtcctgtataaataatcatttgataaactggttttaaatgaatatactcaacaccacgtttttcttgattatcaactaatctttcaccatatcttagaaatcttatttgatcttccaatttaatatcataattatgcatttcaaaatcataatatctccccttatcatcttgtacaacaacatccataatcaatttcttattttcataaaaccctttaaatgtttcactatttatcacaaaagttgatgtaatagattgatcatgtgataagtactggcaaagaaatagccttaattcatcataataaataagtgaataatgaaaaaaataatcatacttatatgtttcaacaatacctaattccgtagaagattttttattcatatcttttcctccttctcacaaaagaaccctctacttctatatacaaaaaattttttcatttttctttttttatctgatattttcttaaaataattttatcatgaactcattttattttcaataagcaaataatcgtattaaaaaatatctccctacagggagatataatcaatcaaattgccttaaccacttagaaaataaagttaaaccttctttaacttctttctcatcatgagtaaaaccaaaacgcaaatgattttctactccaaaagttactcctggaacaaagaaaataccagtttcctcttgaagtttttcacaaaactcagctgatggcatatcaacatcatattttaagaaacaaactgtgccttcatctggaatgacacatgacacacgtggttcattatcaagccaatctcttaaaatctgttttgttgtttgacaaatagttaaacttctttttaatattttatctttattttctaggaccagacaagctaaataatcatctagtggtccactactaatgatgtgataatcacgacgataattaatcaaatcaatgacatctttaggacctttgatccagcctactctaagacctgcaaacgaaaaaactttagataaactttgtgtcacaattgctttttcataataatcgctaaatgaaggtgacaattgttgcgttttcgtattgactccacgatagatttcatcacataaaatataacaatcattttctttagctaaagtaatgatatcttgcataagttctaaaggtattgttgttccagttggattatttggtgaatttaaacaaatcattttagtatgagatttcatgacttttttaaaatcatcaatcgttggcatccaatctttttcttcagataaatgaataagtgaaacatcacatcctaatgacttaggaaagtcatacatttgttgataagatgggaataaactgataatatgatcacctggttctaataaagaaatcattaccaattcatttgcattaatagccccatgggtaatagtaacattatcagcactacctgtttgatatagagacaatattgcttgttttaaacgtgttgagccaacaataggaccataatccatagtcattgacataattgaagaagcaatatcttcttcaacatattgctgaagatcatttaaagataaggatgacacacatgtctctgtcaaattatattgacaatgagtttcatgatctgtcatccaagtttctacttcaaattcttcaattttcattaatgcataacctttttcaagaagtcttgtgctctttgggtttttggttgagagaaaaagtcttcagcattattttcctctataattttaccaccctctaagaagatgacacgatctgcaacagttcttgcaaatcccatttcatgagttacaacaaccattgtcattccttcttgtgctaattcttgcataacttctaaaacttcaataaccatttcaggatccaaggcacttgttggttcatcaaacaacataatctcagggttcatacataaacttcttgcaatcgcaacacgttgtttttgtccaccagacaatttattaggatattcatcctttttatctaataaaccaacacgttttaaatattgacaagcaatttcttcagcttcatcttttgattttttcatcacttgaataggtgctaaagttaagttttctaaaactgtcatattaggaaataaattgaaatgttgaaaaacaaatcccattttatttcttaattggcgacctttatcttcaccatttaaatctaatttttgatcataaatataaacgtctcctgattctggaacttcaagaccattaatacatcttaaaacggtactcttccctgaaccagatggtccaatcaagcaaacaatttcacctttttttatttccaaagaaacatcgtctacagcttttaaatttttaaagttctttgtaatatgttctaatttaatcactggcagccaacttcctttctatatatcttcctaaataagaaacacttaatgtcataatcaaataaaagattgcagcaacacaatatggagacataacatcaaaatattttgctccaataacttgtgctccttttaataattcaacagcaccaatacaactaatcaaagaagaatccttaatcaatgtaataaattcactaataacgggtggaataataatcttaaaagcctgtggcaaaacaaccatcttcattgtttgccaatgacttaaccctaatgtttcacatgcttcccattgtcccttatcaacaccattaataccacttctaattaactctgtagaataagcaccactgttaatactcattgctatagcaccaataacataagtatttattcttaaaatatccccagttaaagccgtatacaatgatggaacaacagaaaacaataataaaatttgtaataacattggcgttccacgaatcacttctacatagacatttccaatgattctaaatatacgatatttagaacgtttggcagttgatcctaaaatacctaaaatcaatccaagaacaagggatacagcagctatcaaaagtgatatcaatgcccctttggctaaatataatatattttctggagtaaacactttatcaaatgctgtaaacataccatccctaccttctttcttatttttctaatttctttaaaccatattgatcacataatttattgtaatcttctgaatttaagaatttatcaatgcatttgttaattttttcaataacttctttatttccttttttagcaataatataattcttttcatctaataaagaaccatctaacattttaaagtttccactatttacataatttttagcaacagctaaatcaacaatagcagcatcatattgatgagcagctaatccattaaaaatatcttgtacatttttcattccaactacatctgcatttttaattgctttagcagcattttcaccagttgctccagtttgagccgcgatttttttaccttctaaatcttttgcagaagcaattttgctatcttttggtaaaacagcaacttgagcagttgcagtataaggattagaccattctacaactctttctttatcataagtaaatccagaaattcctaaatcaatttgacttccttgaagttgtgtaacaatattatcaaaatccatttgtttgaattctaatttatatgtttttccttcactctcagttaaatacccttcaaataatttcaccatatctgcatcaaaaccaacaattgttccatcagtgtctaatgattcatatggtgcatagtcaggtgaaactccaactgttaaagtcacagtttctttatcttttgattcatttgcagaattatctgcttttttatcatcatttcctccacaagctgtcattgttaatgccatagcggcaactaataaaccttttactaattttttcatcttttttccctctactttcatctttttttgttttatgttttcgtttttataactataagtgcttgagacactcaccgcaataaattcaccctgttcacaaaactcatccccttttcttcaataaaaaacgcctcttagtataaaactaagagacgaaagattccgcggtaccactcttgttgatatatccaaagatatatcccctcttgtctttaaagcagacctactcaatatcctactgatttcagatattgctctccaaagtgcggttcatttaaacttgtatactaacctcacaccaacgttagctcgcttcatactcatttaaactactctctttttcattgagtttgttgatatgtctagtattataaacgattgttatcaattgtcaataataaatttgtctttttttattttttatcattattattttttaaagcacgagtcataatcgcttgtacaacagcgcttttttgatctgcataatcttgtacataacgccaaaccttctgggctaaagaacgctttgtttgagcataaagttctctatcttctggatgatttataagccaatcacgaaaaacaagcatccgtttagcttctaaacaatccttggaaaaaacatgtaaatgaattgctctatcagttgctaaaaacatccgatgttcataccaatcaggttctctcacctttaaaatatagccattttctagaagctgtggtacataatcatcttctttgctagaatcagtaacaattaacaaaatatcaataattggtttagcgcataaacccggtactgacgttgaaccaacatgttctatttgaataactttatcttttaaaatttctttaattttcttttcttcgtattggtaatcattgacccacttaggatcatactcatgtaaaataattttttgattatattcttgaatcttctgtacatgactttcttgtagttgttcatctctcatttttaaacaaataggtgaatttttatcacttgtataaagataatgcaacatctcaccatgataataagttgttaaaaactcatcttctttttgcatgccaagctttttagccagtgcaatagaagcatagttatcatgtttaataatcgcatgtaaatgttcttgttttaaatgatagaaggcataattttgacagcagcaacatgcttcataagcatatccttgatgccaatattctttttttaaaagatatcctaattctaatatctgcgttcctctgtaatcttgcattgacaaaccgacttgtcctataaacttatgattggcttttaaaatcactgcccataatccaaaaccatcttgacgatacctttgtatttgtctatccagccagtctttgacatcctgcttggaaaaatcatgctcatatgcatacatgacttgaggatcttgtaaaagtgttgccaagtcatcaaaatcatcttcattgaattctcttaaatataaacgttttgtttctaaaagcatttttccccctccgattaaaaaaacatttcaaaagaaatgttatttcatatagcttaatattttctttgaaatctcatttaaacgagataatggttcattcatttgatctaattgagtctgtaactcatctaattcattattcatttcatcaatgtcttgacgatattctttgattattttaatttcacgtgccattttttctcttttatctaataaataaatcgctaaagctaaaaaaatgagaccacctataatataaataaaaatcatattcatccctcatttctttgattattatatcatactatttcctttttgaatatctttattcaagacatttcatgaatattttcttatcttttgaccatcctttacaaaaaggagtgaagaaaaaaatgccatatattacaaatgtttttgctagacaagttttagattccagaggttttccaacaatcgaagtggaagtttattgtgaaagtggagcgaaagggagagcaatcgtaccttctggcgcttctactggaatttatgaagctcatgaattaagagatgaagttaaagattgttatttagggaaaagtgtttttaaagctgttaatcatgttaatgattgtattcaagatgaattattgggttgtgatgtgacaaatcacccgagtttcgaagcataattttgcaaaaccaattagaccatctcctcaatgtgttgattatatctagtattttagttatctgagatactttttttattgtcaatatttattcactttattgtagtataatgtaatattttatggtataatagtattagattggatgtgatactatgttccttaaaaaatctaaatataaaaacggcagaacttttctctcaatcgttgaagcttatcgagatgagaacggtaagccaaagcaacgtcttattcaaaaaattggttatcttgatgatttcactgataaatatgatgatcctattgctcatttcactgatgtcgctaaaaatatgactgacgaggcgaagaatgattccaacatttccttagccattgatatgaatgcaaccatagatgatggatataaccttttcaatgttggttatcttcctttcaagtatatctataatgaacttggaattaatgatttctttataaacaaacagagaaatctcaatatcgacttttcattgagtagaaatcttcagcttcttgtcttttctagaattttatttcctgcctctaagaaatcaacctatgaaaacagaaatagattcttcgctccgtttaatgatggcatcacgaaagactccatctataaatctcttgattatttttatcggtacaaggaggaaattcaggcgcttatctggaaaaacactaaagatacatatagcagagatatatcaaaaagctattatgactgtaccaactattatttcgagatagaatacaacgatgatgatatcattgacgaaaatggagaagtcattgaaaagggattaagaaaaagaggtcctgaaaaaaatcatagaccagaccctattgttgaaatgggattgcttatggacgcttctggcattccgcttgcctatgacctttttcctggaaatgagtctgagaagctttcactcagaccccttctcaagaaaacaaaagcagattttgaaattcagcgaacgattgtcgttgcagatcgtgggctcaatacatccgacaacatctactaccttgcaggaagaaatgataaggaatccaacagtatggatggatatgtttacggtcaatcagtaagaggagcagataaggagttcaaggaatgggttctcaatgaaaaagattataaagtcgaagctgtcaaagaagatggagaagatatcatattcattcataaatcgagagtatacgcaaaggagataaagattctaagagatggaaaaagaaaagtgaaggttaatgtatgtcaaaagcagatggtttacttttcattcaaatatctgatgaagcaaagaaatgacagaaataaaatgatcaaaaaagctcaggaaatgatcagcaatccagccgcctatacccgagcgactacgtatggggcagctggatatgttggaaatctggaatttgatgcagcaactggagaaatcaaaaacggaaaagcacttttcatagatcaagaaaaaatcgccgaagaagaaaaatatgatggatattattcaatcgtgacaagcgaaatagaacttgatgattatgaaataagaaagatatatagagggttatctaaaatagaagatacctttaaagtatcaaaaacaaattttggagcaagaccctcatatgtgtggacaaaagagcatatcgaaggacatttcttcacatgctttattgcattggttattatgaggctgcttgaaagaaaactgggctacaaatatacagctgatcaaattattacatcagccaaaaaatacaattgcataaatatagacaggaatatatatcagtttatctataaggatagaatcatagaagacatttcaaaagcatttaatatcaatcttgataaaaaatacgaaaaaagagaaaaaatcaaaaaattgttaaaatactagaaattacactacaataaaatgtagctgtttcagcttttattatgcatatcaaaaaagagaaaacaccttatataatcaaggtttttcccttttatagtactcatttattcaatatatctgcttcgaaagtcaagattatatcatactatttcctttttgaatatctttattcaagacatttcatgaatattttcttatcttttgaccatcctttacaaaaaggagtgaagaaaaaaatgccatatattacaaatgtttttgctagacaagttttagattccagaggttttccaacaatcgaagtggaagtttattgtgaaagtggagcgaaagggagagcaatcgtaccttctggcgcttctactggaatttatgaagctcatgaattaagagatgaagttaaagattgttatttagggaaaagtgtttttaaagctgttaatcatgttaatgattgtattcaagacgaattattgggttgtgatgtgacaaatcaaagatatattgatgatttattgattcagttagatggaacaaagaataaatctaaattgggagctaacgctattttaggagtttctttagctgttgctgcctgtggggcaaattactatgatatgtccttataccaatatattggtggttgtaatgcacatgtccttcctattccaatgatgaatattatcaacggtggggcccatgccgataaccccttagattttcaagaatttatgattgttcctgtgggtgcacacagtatgaaacaagctgttgagatgggttcaacaacatttcatcatttaaagaagatattaaaacaaaaaggactcaatacttcagttggtgatgaaggtggttttgcccctatgttagaagataacgatactgctttacaatgtatcctagaagctattcaagctgctggatatcaaccccatgaagatatttgcattgccttagatgtagctgccagtgagttctatcatgatggtctctatcatatgcaaaataaagaatatacttctcaagagcttatcacttattatgaaaacttatgtgatcgttatccaatcatttctattgaagatggattagaccaagatgatactgatggttggcaagctttaacaaaacatttatcccatattatgctggttggtgatgatttgtttgtcacaaataaagatcgtctccaaatgggtattgatgaaaatattgcaaatgcaatattaatcaaagtcaatcaaattggaaccttaactgaaacattggatgcgattgaattagcaaaaagacatcaatataagattgttgtttctcatcgttctggcgaaacagaagatacatttattgctgatttagcagttgctacaaacgctggttatatcaaaaccggatcattatcacgtagtgaaagaattgcaaaatataatcagttattaagaattgaagaagaattaatccctgaacagtgttatggaattgaaaaatcaaaatcaacatttcataaataacaggaaaggaagaatctgttaaattgattcttcctttttctttgtaaattattaattttcattaaactgcatgttatataagtaagcatattgaccttgtttagccaataattcctcatgtgtcccttcttcttcaattccatttgacgttaagacacaaattcgtttagcattcttgattgttgataaacgatgagcaatgacgaatgtcgtacgatgtgcagctaaggattctaacgattcttgtacaatatgttcactttcattatccaaggcactggttgcttcatcaaaaattaaaattggcggattcttcaagaaaactctagcaatcgataatctttgtttttgaccaccggatagctttactcctctttgaccacaatctgtatcataaccttcaggtaaagccataataaactcatgagcattcgcttttttagctgcttcgataacttcttcatccgtcgcattaaacttaccataacggatattatccataattgttccagcaaacaaataaacatcttgttgaacaattccaatattttgacgtagactcgcaagttttacatcacgaatatcttgaccatcaatcataattcttccttcactgacttcataaaaacgtggcaacaatgaacaaatcgttgttttcccaaccccggatgaaccaaccaaagcaatatattctcctggctgtacatcaagttgaatgtgttttaaaacatactcacttttatcattatagcgaaaagcaacatcttcaaaacaaacatgtccttgaacatcttttaattccacagcatcggccttatcttgaatatctggttgaacttctaaaatttccataaaacgttcaaaaccagttgcgccttcttgaaattgttcagtaaaattaattaatttcttaactggttctattaaattagcaatatacaaaacaaaagcaattaaatctggggttgtaatagcttcttgactaataaataatgccccaaagaaaataacggcaatggtaatcatgcttgtaaaaacacctaaaccagaatgatattttgccatatataaataactattgcgtttactatcaacaaaattcatattttctacttgaaacttatccatttcttgactttcattagcaaaacttttaacaactcgaatccctgataaattatcttcaatacgggcattaatatcaccaattctttgcttatttctcttatatgcctttttcatttttttattatagtaataggcaaagccacccataactggaataaaagcaaaaacaatcaaagtcaacttcaaatgaattgatgacaaaataataaatgccccaacaaatttaattaaagaaataacaatatcttctggtccatgatgataaagttcagtcaaagaaaaaatatcattcgtaatacgtgacatcaattgtccagttttttgttcatcataaaaactaaaagataatttttgataatgttcaaaaagttcattacgaatatctctttccatataagttcccatcacatgtccttgatatgtcacatagaaattacaaaaaaattcaatgacaaccaaaaccagcatcaataaccctaattgataaatcttacctaattcaatcggttctgctactaaaataacccctgtaatataacgtgtaatcattgggaaaacaagagtaactcctgctgccaacattgcacaaaccatatctaagataaagattttcttatatggtttataatatgaaataaattttctaaatcttcctttcattacttttcccccttttcctttagctaaaaagcctacagcgtaggcttataaaatataatctgaaggatcaacatgttcttcttcaattaaacgaccaatttcttcactatcatcatttaaaattgaaaaagcaatatttgttgcatgatctccaactctttccaaagcagcaaccaaatcagaataaagcattccttctcgtggtgctgtttcttttctcttgatatctgttaaataagctttttgtagcctatcttcttttcgatcaactaaatcttctaactttaagatttcatttaaatgatctaatgacttttgtgtaaacatatctaaacttaattctaactcagaattaaccattgttaatagttctctaatttctgttttatgtgcatgagtaaattgatatttttttctttcccatgttaaagtaatatttgcgattgacttggcatgatcaccaatacgttcaatatcagcaataacatggaacaatggtccaataatacgtgaatcttcttctggtaaaggaacctgattaatccgatttaaatattcaaaaatcgcatgattcaagaaatcaatatgttcctcatttttagcaatttcttcttgtgttgaagtatcaatttccaataaagaattaactgctaaatttaaatttaaacgagcaatctcagccatacgttcaacttcatgaatagcctgagggatagctgttgttgcagaaaaagcaactttatcactaatatattgcaatgagaatccactttcttcatcatcacctggaaccaacacataagtagctttaacaatccatttcgtaaatggatagagaataaggacttggaatactttaaaaatcgtatgcgcattagcaacatttcttgccatcgcatcatgtaacgcttgtcctgttaaatgttgtgaaccagtgagtgccatgataccaccttcaatttgtggcataaacaattgcaataaaacaacaattgctagtgagccaaagacattaaataagaaatggatataagccgcacgtttggcattcttcttcccaccaagactagcaattaaagcagaaacacatgatcccatattacatcctaaaataatataaaaacaaatatgcaattgtaataacccttgagaagctaacaaaataacaatcccaactgttgctgatgatgattgtaatactgctgtaatcgcaaatccaatcaatattgctaagaatggattcgttaaagtagaaagcatatgtacaatcactggtgaatcttttaaagttgacattgcccctgacattgaagctaaaccaacaaataaaataccaaaacctaaaataacttcaccaatcttttgaatatttgctttctttgagaacatcagcataactacaccaattaaaacaaacagtggtgcaatatccgataaattaaatgcgattaattgtcctgtaattgtcgttccaatattggctcccatgatgattccagttgcctgatataaattcatcaatccagcattgacaaaacttactaccaaaacagttgtcgcagatgatgattggacaacagccgtgaatgccattcccactaacatcccaacaaaagtattttttgtcattttttctaatattgtacgcaattttgctcccgctacgttggctaaggaatcgctcataagtttcatcccatataagaacattcctagtcctcccataagcgagaaaactaacgtcaaatccataaatgacctcctcatttttgtcatttttacacaaagttacaaagttattatactatataattgataccttgaaaacaaacaatttacatttttttaacaaattcttaatattttcttaaggtaagcatctattagacaatatccatggagtttgatataatactatagaaagtctggtggaaatatgaaatatcaaattaaaatcataaattatcgtccttatgaacatgaattattccaaaaaaaattaaatcaattaggtcaaatgggttattattgtcgtgatttatctttgatttcaatctttaaacaagttaatcatccaatttattactatattgattttcataaaacatttgggaaaaacagaaaagaaaaaaaagccgataaagaagcttttgtaaaaaaatatatcaaaaaatcttatcagtttatttataataaacgtgatatgtatgtttttgcaagtcaacaagaaaaagattttcaaatcaatcttaaaaacaaaaaagatctgattgataatatcaaaagaatccaatcattttgtgcttttattgcttcattatggttagctgcatttttcattcttggctctttatatgccatgaatattgatacctttttaagttatgggattacttttgtctatgctggtcttgttttactctgcctaacagcagtatttcgctgctttgtgaatttctattataccaaagccttttacaagcagttagccaaaaaaggacaacctttatcttatagtcggctttcttactttagaaaaatatatatgatttgttcaatcacttgcttatgtcttattggtggtggatttgttgaagataccttcaatgctcaagaattcacgttaaaagaacatccggttttaacaatcaaggatttaggaataaatgataaaagtgaacttttaaccttacaacatcgaagcttcacagttcctcattcttattctgttcttgaatcaacaaatcagccaatgctttataccaaagaataccaattacgttctcaaaaatctgctaaacaattaatggaagattttaaagccaatccaaagcagtattattgcacttctgtgaaagaagatcatcatattttatatggatatcaaaatcaaaaattaacaactttaattattcaaaaagaaaatcgtgttgtattattatctttaagctttactccaacacctcaacaaattcaaaaaatgattaattactataaatagctatgcctaaaggcatagctattattatttcataactgcaatatcttcaaaagtctttctttgaggcattgctggatcaatattaccatatcctaacgcaatgacactcacaacagattgattattaggaatcgctaataattcatgaagaatcttagcatctctgattcccataacaagggttgatagtcctaattctgttgccttcaataacaaattcatattatgcaatccacaatcataatatccccatccattgcccaattcattgctaggtgtaccatctcgattaaatcctgaacgatccaaaacaattgctgtaacaatcaaaaccggagcattttcgacattctgctgattaaaatcaggtagggcctctcttacttttgcaagcatttcatcacttctaacaatataataacgggtaacttgtgaatttttccatgatggtgctaaaatcgctgcatcaataatttgatgaatcatctcatcacttacttttgttgcttgatactttcttatacttcttcttttttctaaaacatcttgtaattccatattgaaaacctcctattccattataacaaaatatcttataaaaatatattttcatacaaaaactgaaagacttttttaatctttcagtttcatttaactatttatttgcttcaaccattaaagcacaaactttatttgagaagcctacaggatcatcaattgtaaatccttcaatcaataaagcttgatcatataataatgatgcataatctttaactttctctttatctttttcaaaaatagattgtaaagccgtaaagatttgatgatttgggttaatttccaagattctaccagccttaatattttgaccatcaggcatttgatttaaaaccttttccatttcaaaagaaactccttcaccactgactaagcatactggatgtgattttaatcttgaagatactttaacatcttgaacttgatcttttaaagcttcttttaaagtttctaataaatctttattgctttcattgactttttcaagctctttcttttcttcatcactttcaatatctaaatcaccttgattgatgttcttaaatgctttttctttataatctcttaacatttgtaaacagaattcatcaacattatcagttagatataaaatatcaaatcctttatccttaaccatttcaacagttggtaaatgatcaatcttttcaacactttcaccactagcaaaatagatttctttttgatcttctttcatagcttcaacatattcattaaaagtaatcattttcttattattggcactatagaacaacaataaatcttgtaatttatcttttaacataccatagctattataaaccccaaatttcaattgcaatccaaagttcttaaagaattcttcatatttttcacgatcattctttaacatcttttcaagttcactttgaatacgtttttcaatcttatcagcgataagttttaattgacgatcatgttgtaacatttcacgagaaatatttaatgataaatcttgtgaatcaactaaacctttcacaaatctaaaatgttctggtacaagttcactcgccttatccataataaagactccacgtgaatataattgtaatcctttttcataatcttgagaatagtaattcattggtggttgagatggaataaataacaatgaatcataagaaattgttccttctacactattatgcataacacataatgggtcagaaaaatcattaaatttatctttataaaactcattataatcttcttgagtaatatcttttttaggtcttttccataatggaaccattgaatttaatgtacgatgttcaataacttgttcatattcatcactatcttcttttttcttagaagttgtcatatccatttcaattggataatgaacataatcagaatatttttttactaatctttgaatttcatattcatctaaatattgatcataattttcatcatcagtattctcttttaaataaagattaattcttgttccatgacttggataatcaaattcttgaattgtatatccatcacttgtatcagattcccaaatataacctttatcttcaccatattttttagaaatgacttctactttatgagcaaccatgaaagcagaatagaatccaactccaaattgaccaataatatctacatcagcttcacctttttctaaagcatttttaaattcaaatgatccagaattagcaattgttcctaaatgttcttctaattcttgttcattcatcccaattccttggtcaataattgataacatacgatgatctttattaataacaatttgaattgataaatcatctctagaaataccattaattttttctgttaatgctttataatataatttatcagaagcatcactagcattagaaatcaactctcttaaaaagatttctttatgcgtataaatagaattaatcattaaatctaataatctttgtgattcagctttaaattgttttttatctgccatactatcgtctccttcttattagcactcaaccaatctatgtgctaatagtatattacacctttccattagcacagtcaagtctaaagtgctaaaagagaatgatttttattcattctctttttttaataatttattttctaaatgataaaccttacgaacttgatttaatctttgatagataacctttttatattcttttaaagcatctttatgagaatataattttgttaatttccaatacatattttcatcatattgacgaatactatttaaaaaataaggtcgtgtctttccccgtaaatacaaagtccctggaacaatataatccaaaccaatattttctgctaacttataaatagcttcaaaattttcaacagaatcagtcatataaggaatgataggcatcattaaaatgcctacgcttgcatctgttttttgtttaataagctgtaaaactttcattctttctacacttgaggccgcatttggctcaatgattttttgaattgcttcatctgcacaagtaatcgtacatgtaatattaaccatagctacttttgaaagttcattgattaaatccaaatctcttaaaatcaatgttgattttgttgaaatattaactggattttgatatttaatcatcagctttaaaacgtcacgcattaattccaaatttttttcacacggctgataactatcactaacacttccaaaattaatgatttttttctgccagctttttttacttatttctttttctaaaatttctacaatattttctttataataaatatggtcataaaacttttcatcttctaaataatcatgtgaatacaaagcataacaatataaacaaccatgttcacatcctcgatagatattaacatcatgttgataaggcatacctccatgaacttttcgtattgcacttttacattgaattggtatatattccattctttcacatccttgtatttctattttaccataaccaaaaagaatgagaagatgattctcactcttataaaaattcatatgcttttaaagtcgattctgacgtttttcattaaccaaatgagcatttccaaaagggataactcgttgatgatgataaaacaaaccaccatcatttgcaactgtataagttggtaatcctttttcttgaatgactctttgaattccttcatcttgaataggactatgacaataatgcacttctatttcaaacccatgaaccaatcctaaacctttttgatattgatacgttggataatcatcatctggtgttatatgataatgatcaaactgaaccatagccccggcactggccccaataattaacgctttactttcttgaatgattggagttaatccaaaatcatttaaacgtttaaaatattgatcaggtaatccacctgtaagaaaaacaatatcagcttgtttcactttttgttgagcaatttcatgactatctctgaaataatcaataaatgtgatatcctttaaaccataataatgaaaaggtcttaaaatataaggtgtatgttttccatttatgccatagttttgatcaaattcttgaatatttgtgacttctttttcagcaaaagaaaaaggaatcacaacaaccttcatatcatcatgtaaaagcggtcccatgatatcttgtgcccacttttcatgaaaatcataagaacttaataatatattcattgttttatatgaagaaaaacaagagaaaatctcttgttaatctaaatcctccccatttgattcaaatgcttttttaacccaagcaaatgattttttaggaatacgttttaaatctctcatatctttatttgttctgttgacatatacaaaaccatatcgtttatccatattacacatacttgctaaaatatcaataggtccccaagtaatataacctaaacatttaacaccttcttcaaacattgcatttttcatttctttgatatgttctctatgataattgatacgataatcatcttcaattgttcttccttcagctagcatttgatcaacttcttcttgagtcatatcttcacgccaaccaagaccattttctaatacaaatacaggtaatccagaacgtgtagctaaatcatttaatgtccatctaaatccaattggatcaatttcccaattccattcatttgcttcacaatgtggattcttcacacaatgttcattcacaatttcatgataaggtctttcataatcaaattcaccttcagtaactgtattagaacgataataactaaatgcaatataatctactgtatattttaaaagttcatcatcgccttcttcaaatgttggcatccatcctctattttctaaataagcaaccatataatcaggatattttcctttagcaaaaacatcacaatggaaaccattcatatattgataagcttgccaagcaaataaattgtttttaggtgtatttgtataagggtaaatatttgtcacagcattcattccacagaatttagcatctggttgtaactctcttaatgctttaacagctttacagtgagcaatgaaaacattatgattgacttgatataaatgtttaggtaagctaacaccttcaggaatatcttcagcattagacactcttaacatcataccatgtaagttttgttcattgaaactcatccaatgtttcacacgatctccaaatctttcaatacatactctcgcatatctttcaaaacaatcaacaacataacgagaagcaaaaccattataatttttaactaaatgataaggcatatcaaagtgaactaatgtaatcattggttcaattccagcagctaataacttatcaatcaattgattataaaaagcaactccttcttcattaactggttcatccaatgttccattaggaataattcttgaccagcaaattgaaaaacgataaaaattaaatcccatttctttcattaaagcaatatcttcatcataacgatgatatgcatcaatcgcaacattccaatcagagaattctggattcataggtctaacatcataaacacataaaccttttccaccttcgtttcttgcaccttctgtttgaaatgatgaaacagaaccaccccaataaaaatcttttggcattttcttttccacttaaaaattcctccttaatctttgataaacccattgtatagaaaatatttttaatagtaaatagttcatctggagtttataacaacgtttcataaactcatcatattttcatcaaaatatgaaacaatttttcatcacaaaaatctatgccttaatcgcccaacgcatcttggtagacttggcacggctattgatacgacattcctcttgactaggacgaataacatgacgtgatacatcactatatatccctaaatttttcatctctttaaaagcctttttaacaattctatcttcacctgaatggaaagttaaaatagcgacccttccacccggttttaaaatagttggtaatttctccataaattctaaaagcactccaaattcattattcacttcaatacgtaaagcttgaaacactcttgctgctgattttttagttgcttcttttctttcttcttgaggtaaaaatgataagcttttttcaataattttatagagttgtgttgttgtggtaatgcttgttcctgattttaaataagaatctatatttttggcaatttcttttgcataaggttcatcagaattttggataaagagttcttctaattgatctttatttaattgtttaagacgaagggaagctggaattcccatttgaggatttaatcttaaatccaaagggccttcttttttatacgaaaagccacgctttggattatcaatttgcatagatgatacacctaaatctgctaaaacaaaatcaaataagcctacctcttgagaaacttgatcaatatctttaaaattacaatttttaattgtaatagcatcttctccataaccctttttcaataatctttcttttgttttcacactttcaataggatcaatatccaaagcatacatatgtccagtatgatttaacttttctaacatcttaagtgtatgaccaccataacctaaagtacaatccaatcctatttgtccttcttgaatatctaaaaactctaaaatttcatgaaccataatagataaatgcatacctacaggtgtacttccttttttaatcaccttttcaattgtttctggatataaatcaggatttaattctttatatttttcatcatatcttttaggatgtgtcccactatatctttttcttcttttatgtgttggttccattatttcaattcctttcttagcaacgcatacattttcatatcttgtacttgtccatttttaatagcatttttatgaagggttccttcatatataaatccagccttttctaaaactcgacatgatgctgtattataagcaaaaggctcagcaaaaattcttatgatatcactatgttcaaaaacatattggcaaacttgcttaacagcacttgtcgcataacccttaccccaataatactcacctatataatatcctaattcaccagtacaataatgtatattatcaagacgggtaacgctaatactgccaataacatgttcatcaacacttatagcaaaagcaaacattttttcttgattggcttgcaacatagaagaaatatattcttttgcatcttcaactgtataaggataaggcaatccatctcttaaatgattcatgatcttttgattatttaatattttagctaaatcatattgatcgtctatttgccattttcgtattgtacaatccataaaataacctcctatttttttattctaaaggagtcttatgacaaagtaaagaaaaagcatcctcaagaatgctcatatccattattctttaaaaatatcaattcttttatccatatcataaacaaaacagttacctttttcatgtccaatattttaaaaatcaaacaaccctcttactaaatatcctatctaattaaaattatatctcatcctcattaaaaagtttttctaataattgatttttattattgataaacatttctgtaatttgataactatctgtttcttcatattctatttcatgaacataatgatcaaaagaataaatttgagcatcaggtagtccaagtaagataggcgaatgggttaccacaataaattgtgctccaagctttgataatttattcatttcaaccagtaatgtcaattgacgttgaggcgacaatgctgcctctggttcatctaataaatacaatccattaggtttaaaattattttgtactaaagccaagaaactttcaccatgagatttttcatgatattttttagatggatgtcttgaatcagcatattccatttcttttgttgcgacattatagaaactttcagcgcgaagaaaatatccccacgaaattttacgccatcctttgacaatagtcattgcctgacataattcagaatgcgtttcataggtagaaaaataataatttcttgtaccaccttctgcattaaatccactagctatggcaatcgcttcaagtaaagtagatttcccgcttccattctcgcccacaaaaaatgtaacatttttctctaattttaattcatcaagctgacaaagtgaatcaatatatctaagataactctgttttgaaatgcgttcccaatcaattttaattttctgtataaataattcattcaaaacaatcacctacctcttatagaaacaaatacttctcctacatgaaatgatttatttatctttattatatcatttatccatcctttaatcatctacaaacaaaaaagagctataactcctttcaaataggaatttacagctcatttttattattcaaattcatttgttttagcaacttgtctaatccaagcagcagatttcttttctttacgcttatatccatcatcaagacatactcttacaaatccataacgattcttaaatgcattacaccaagaccagttatcaataacaccccaataatgatatcctaaacaattcgctccatcttcaatggcttttgcaatccattccaaatgatctcttacaaattcaatacgataatcatcttgaatgacaccattttcatccatgaatttttcttcaccttcgacacccattccattttcagaaataaagaatggtaaatcaggacattcttttttaattttcataccaaaatcataaatacctttaggatagatttcccatccacgatgcacattcatctttctttctggccaaatatatggttttgaaatacatggtaaaccattttcatcaaattttgaatcgggtgcttgaacacgtgtaggctgataatagttaaatcctaaccaatccactttaccttgtgataaaattgcttcatcaccaggacgacgattgatttcaactttccaatcattttcaactgtatctaaaacatcctctggtaaatgaccatgagccacaacatctaaccaccaacgattatgtaatccatcagtcatacgaacagcttctaaatcttcaggagttggattgtcttttgtatatggtggtgcaaaacaattgatcattccaatttttgccccctccatcatttttccttctttttgaagttttctaaaattcataacggctaaacaatgagctaaagtaatattatattgtacattaatagattgtttaaaatcatgcaaataaggataccaagttcctaataaaaattgttgttctggttcaacaattggttcattgaaagtaaaccaatatttgacttttccaccaaattcttccattgctttttttacaaaattagcataagcttcaaccacttcacgattctgccatccaccacgttttaccaaatattcaggcatatcaaaatgatacatattcataaaaatatcaatcccattttcattggcacaatcaatcaatttatgataccaagcagccccttctgggttgatattgccatcttgatccaataatcttgtccattgcatagatgttctaaaagatttaaaattcatactttttaaaagcttaatatcttcctcatatttatgatacatgtcatttcctacatatgatcctacgttattaaaaaaagcattaatttccatatctgaatacatatcccaataggaacgaagtcgacctcctacattccaactcccttccgtttgtggtccagacattgctgcaccaaagaaaaaatctttaggtaattttattgtcattttttattcctccttattttatctttattatattataaaaacagggagaattaaacaaatacgatcgtgtttaaggatttattttattctatttcatgatatactaagtatggtgataaaaatgagtataatgacacaactagaatttgagcttgaattctctgaatcagaaaaagaaatcgcaagatatattttaaatcatggagatgatgttttaagtatgtcagtgaaagaactggcgaaaaatacttatacctccccagcaactattgttcgtttatgtaaaaagattggattagaaggatataatgattttaagatcaaatattctgcagaactccaatatgatttgcatcattctaatcggattgatgtgaattttccttttgaaaaaaaagacactcatccaatgatttgtcataagctggcttctttatctgaagaagtcattgcagatacaattaaacttattgattttgagcaattagagaaaattgttgatttattatatcaatctcatgatattgatatctatggttctggtaattctttacttgcagccatgagttttcaacataaaatgatgcggattgctagaaatgtaaatttaaaagcattacatggggaacaagtctttttatcatataattctgatgaaaaaagaattgctgtgattatttcttattctggagagacgcatgatttgattcaaattgcgcaaattttaaaagaaaagaaaacccctattattgttttaacttctattggtgacaatcatttatcacattatgctgactatattttaaatattggttcacgagaaaaaatctttaccaaaattgccccttttgcttcacaagtttctatggaatatttattaaacgtgattttctcatgtatctttcaaaaagattatgatcaaaatattcaaaataaaatcagttatgataaaaagaatgactctcgtcatcctctatcaagtcctgtaagtgattaaaataaacttaattgttcaacggtttgttgatgggttttataagctttaataatatcttccatcttatataacaaaccgtatttttcacattctctttgaaaaacatatcttaaatgatgaatatttttactattgcaaacatagcgagccccatatctttttatgtatttttcttttaatccaggaaaatgttcatctaacttctgataataatagtctctttgtcgatcacgtaatgtgacaccaaaaaaagcatgtacaaaatgtgccccatgctcatgagccattttgacaatttgtataacattttcttctgtatcattgataaatggtaaaagtggttgcattaaaatgccagtaaaaagacctgcttcactcattttctgaatggctaaaaaacgttttgaagatacacaaacatggggttcaattatttttgagagttcatcatcataagtggttattgtcattttaacaataacatcattatatttttgaatagctaaaaataaatctatgtctctaacaaccaaatcacttttggtttctaaagataccccaaaatgatattgagcaagtaattttaaagctcctcttgtgatttcttcttgttcttcaaagcgattataagtatcactcattgccccaattccaacaacacctttatatttctttttcattaattcctgatttaaaatcgttaaagcatttgctttaactttgacaatatcaaattcatcattttgataacattcactacgactatcacaataaatacaaccatgatgacaaccacgatataaattcatattataatcattcccaaaccaatattggggattttttgttttacttaaaattgtttttgcttcaattgtttgcatatgttctccttgataagaaaagaactgaaaaatcagttcttttacttttgatcatcatcatttgttgcgattttaccaccgataaatccagctaataaactctttaaatcaattcccattgattcattcattccttcactcacttgagttgctgttgtcacgatatcagaaacaagtttagcactatttccatcaccatacattgtaatcttatcaactttttcaagtggtttagctgctgcttcaacagctttaggtaacatattaaaatacatttccataacagctgcttcaccatatttcttcatagcttcagcttttttatttaaagcttcagcttcggccattcctttagcttcaattgctttggcttcagcttcacctttagcttgaataccagctgcttcttgttccatttgatatttcacagcttcggcttcggcttttttagcttcagcttcacgttgtttttcaaaaagttgcgcttcagcatctttttgacgtttatacaattcagcatcagctctttgttgagcagcaaatctttctgcttcagcttgttttttaatcttcgcatctaattcttgttcagtgacttcaacatccttacgtcttaattcaatttctttttcttgtttcatgatattggcatcagctgttgcaatttcaattgatttacgagattgttcttcttgaatcttgtaagctgcatctgcttctgcttgcttagcatcagccactttctttaactcagcttttttaattgccaattcattattcttttcagcaatgattgtttctgctgcaatcttggcatcgtttgcttcttgagaagcttttgcttgagcttgagcaatatctctttcactcacagcacgagaaattgctgcatttttttgaatcttaacgatgttatcgacacctaagttttcaattacaccattcccatctacgaaattttgaacattaaatgaaacaatatctaaccccattttcgctaaatcaggttcagcattttctttcaccaattcagcaaatttttgacgatcagaaaccatttcttcaagattcatacgaccaacaatttcacgcatatttccttccaaaacttctctagccacatttgcaatatattctactggcttatttaagaagttttgagcagctaaatttaaacgtgatggctcatcactgattttaatattaactgccgcatcaacattaatattaatatagtcagcggttggaaccgcatttgatgttttcacatcaatcggaattaactgtagattcaattcatctttcttttctaagaaaggaatcttaatcccagctttcccaattaaaacttttggctcttttcttaacccagaaataatataggctgtatcaggtgatgctttcacatatcctgtcacaacaatgactaataccaaaactgcgacaatcacacctatcacaactgcaatattcccaaaaatcatatctaataaatccatgtttaccctcctatctattctatgacttattttaccattgatgtgatgatgttgtaaacatttatcgacaattctccctaatcaaaaaaagaactattctcatagttccttaatctaaaggtatttcaatatccccaaggactccaacttgatcaaaagaaattccaaaatgcaattcatcatcttcattcacataaacaatacgataccattgatgttgatctgtttttaaatattcaatattgttttccattgaatatcctactgtacacaaaacaattccaagtaccaacataaagactgaaataagaccaccaatttttattaaagatttattcttatcatttaacatacaacccccacctttcttaaaagttgataacttgacttcttgatatatgatgtcatagtttgagaataagctaaaatttttcgtgaaacaagataagtcaaaataagtcctataataccaaaagccccatagattgcacttactccaagttgtgttaaacctaaagataaagatgtaaagaaaagtggaaatgaaccaaatattccaacaataaaacacacaaccccagccattcccacagcaattgtcataattggaatacaccataaaataatgtaagcacataagacacaaagaaaagccgtggctaataaagatccccataaaggaaatcctaaaaccaataataatgaaatgaaagccatattctttttactttgttttttaataacaatattttcttcttcacctttcatttgacttaaaatatcattgatatctcctaaactttcaattgcttcttgttccgttttcccatcttcaatcaaatcactaatcatttcatcataatattcaatgacttgacaaacatattcatagctttcatctttcaattttaattttaaattttctataaattgttgtttattcatcacttgatgcctccttaatatattgataaatactttcaacctgttgccaactttccaagaaatcttgaattctttcttttcctaaatcagtaattttaaaatattttcttaaacgtccattatgttctactgagtatgtttctacaaattgatgtgattccaatcttttcaagattggatacaaagttgattcagaaatttgaatacattgacttgtttctttgataatttgataaccataagagtcttttttcacaagactcgctaaaacacaatattctaataaccctttttttaattgtatttccatcttatgcctcctgacacacaatactatacattacatagtattatgtgtcaacaagtatttaaataaaataaaaaccacgtctaaaaggcgtggttttctctgcggctataagcctttgttgcttgctcgcgtctcaaggcgctgctttcacttcgttcaagctaccgctcttgactctcgctatccctcaaagggattttttgctatttttctttcttcccttttttcttcttctctttcttgatttccttttcttcaaatggatccttgtattctttcacactcagtttatccatcgctatatcatatgcttcttgctcccttatatattttgcgaccgtttgatcatttagtcctactgtacttacataatatccttctgcccaaaaatgtctattcccatattgatattttaaattcgcatgtctatcaaacatcatcaatgctgatttccctttgagatatcccataaatgatgatatgctttcttttggtggtatcatcaccagcatatgaacacgatctatcatcaaatgtccctctattatttctactcctctatatctgcataatctccttaatatttctcccaagtcttctcgatattgattatatatcgcttttcgtctatacttaggtgtgaacacaatatggtatttacacatccattttgcgtgtgctaaagaattcgcttttttagccatagtcaaatcacctttcctttcttttaatgatagcttgaacaacttcattatactggaaaggtgatactactgtataactttttattctccacccgcatagcaggtggttttttgtttcacacatttcatgtgttcaactgactaaagtctatttgttcaaattttcaatttgaacagtataaataaaaaatagcacattgtgctatttcataaagaacgtccaatatccttgaataaaaataaagataataatacatggtaaaatatattttaaataatactttgtccaacttggaaaatgaattccctttccttcatttgcttctgctaagaaattttcaaatccccaaccataacgagatgtacagaaaagaagataggcaagtgaccctaatggcaagaaattatatgtgacaaagaagtcttctaaatcttgaatataagttcctgcaccaaaaggattgactccactcaatacattaaaacctaatgcacaaggtagagataaaacaaaaatgagaacaatattaatgaagacagatttttgtcttgaccaatgccataaatccataccaaaagaaataatattttcaaagacagcaacaattgttgataaagctgcaaaactcataaagacaaagaataaacatccccatacttgtcctaaccacatttcattaaaaatactaggtaatgtaataaaaacaagtcctggtccactttctggattaactccaaaagcaaaacatgccggaaaaataattaatccagaacaaattgcaacaacagtatctaaggtacatacacttaatgtttcaccgaataaacgttgatctttgttgatataacttccaaaaatcgcaatggccccaatccctagactcaaagtaaaaaatgcctgtcccattgccgcaaagataacttcaagtaatccatacttagcaatggtcgaaaaattaggaatcaaataaaatgataacccctcacttcctcctggcaaggtcacagaacgtacgaccaagataataataattacaaataaagatgacatcataatcttcgtcattttttcaaccccattttgtaaaccgagtgaacaaacaccaaatcctaaagcaactactacgaccatccaaaaaacttgcataaaaggatcttgtaatgattgattgaaaatatcagcaactccctggggtgaaacaccttgaaaatcaccattaaacatcttaaagaaatatgaaatcatccaaccaccaacagtagtataaaacatcattaacatatagtttccagcagcttgaaaataaccaatatatttccatttctttttagttggttcaattgtttcaaaagcttttacagcacttttttgactcgcacgtccaaccgcaaattccattgtcataatcggtgcccctaaaataactaaaaacaataaataaattaaaacaaataaggctccaccatattgtccaacaacataaggaaaacgccaaacatttcctaaacctattgcacatcccgctgatatcaaaataaatcctaaacgagatgaaaacttttctctttccataattcaactccccttttttacgtaacatatagtttacactaaaaaaagcgaaatgtaaaaactttaataaaaataaaaagtgatgagaaaaactcatcacttctaatcattaataattttctaccattctttcaaagaaagcctttggatatccacaagttggacatctttcaggtgcttcttcaccttcatagatgaatccacattgtctacatttccatcctttaggagcatctcctttgaatgttttatcttctttataattctttaataatcttaaataacgtgcttcatgtgatctttcaactttaccaacattttcaaacttaatagctaattcttcaaatccttcttctcttgcttctttagccattcttgcatacatgtcagtccattcttcattttcaccagcagctgcagcttctaagttttcatcagtagctccaataccatggaattcactaaaccacatttttgcatgttgtttttcttgattagcagtttcttcaaaaatcgcagcgatttgttctaatccttcttttcttgccatttctgcgaaataagtgtatttatttctcgcttgagattccccagcgaatgcttccattaaattcttttcagtttttgtgccagcatattttgatgttctttcttcttctactttttcaaattgactagctggaactttacaaattggacattgttctggagcagcatctccttcataaacatatccacatactttacatacccattttgccataattattttttcctccttcaattttttatctgtctttattatactacaaattttaacaaaatcaagaacttttttaataatagtaatcattactatataaaagtggcttatttcttgacttttctcataaaaaaatattttaactagaatttataatgtgatatatttgagatattttttgctgaaagtttcgcttttttcctattgataagatatagcaattgttttttttataaacgcgttgtataatagcactgttaaaagggatatctatagtaatgaccatttggcattaactttatctttcttttaacaaatttatagaaacgtcgcattctgttaaagaagtgacagtggagggtaaaaaatgaataaacaaaaaacaaagaaccttgcgttcatgtcgctatttatagcgatagaaattctcatggtgatggtgccatttttaggctttatcccagttggtccattgcgtgcaacaaccttgcatattcctgttattattgcaggtattgttttaggaaaagaaaaaggtgctggaattggtctagtatttggtttatcaagtttgattatgaatacaattcaacctacagtgacatcatttgtcttttccccatttattagtggatctattttaagtgctgttattgctattgttccacgtgttttgattggttatgttgccggtctcatttacgaattattaaaaggtaaaaatgagacaatcgctatgatcgtaggttcttttttaggtgccatgacaaatacaattcttgttcttggaggaatttatgtgatttttggttctcaatatgccagtgctattggacaagatttttccgcattacttccttatttattaggaattataacaacaaatggaattgttgaagcaattgttggaacaattattgctgtgatggtttctcgtatattaattaaaatgaattaaagaaatgaggatccccgatgtcaaaaaaaattattattggtattactggtagtattgctgcatataaagccattcaattgattagtgacttgatgaaaaaagactttcatgtagaagtcatgatgagtgaaagtgcaactcagtttgtgacacctgtatgtattcaatcattaaccaaacgaaaagtttatgttgatacttttgatgatgaaaatcctgcaatcattacgcatgttgatattgtcaaggatgcagatttatttatggttgtcccagcaagtgctcatactattgctaaattagccaatggccttgctgataatatgttaacttgtgcatttttagctgcaacttgtccaaagttgattgctccagcaatgaatgtccatatgtataaaaatcctatcacgcaaagaaatattcaaagtcttaaggaacttggagtatattttgttgaaccaacttcaggaatcttagcatgtggcgatattggtaaaggaaaattagctgatgaagatgatttgatggatatgattgactttgcacttgctaataagccattgctaggtaaaaaaatcttagtcagtgctggtccaacccaagaaagtattgatccagttcgttatatcacgaatcattcaagtggaaaaatgggttacgctattgctaaggctgccttttgcctaggggctgatgtgactttagtgagtggtcctacgcatttaaaactcccatatggggtaacatgtattgatgttattagtgctaaagatatgtatgaatcaattattgagagtgctagtcatcaagattatattatcatgtccgccgcggtaggagattatgcagtccaagaaattgctgatgaaaaaatcaagaaaaatgatgaaacacttactttagacttacagaagaataaagatattttatatgaattgggtcaaagaaaacaagccaatcaagtcttatgtggttttgctatggaaacaagtgatttgattttacatgcaaaagaaaaactagaaaagaagaattgtgatatgattgttgctaatcatttaaagactgcaggtgctggttttcagggtgataccaatgttgtgacaatgataacacaagatgatatgctagattatggcttaatgtctaaagaagaattagcttatgtgattttagagactttaatggatttggagggacaaagatgttagttgttattgatattggaaatacaaatattacaatgggagtttatcgtcaagatgaattaattggaaattatcgtttgacaacgaaatttcaaagaacatcggatgaatatggatttatgttattgtcttttttaaatgcttcatctattttagttgaagatattgaagatattattattagtagtgtcgttccaaagattaattattcttttacaaactgtataaagaaatacttacataaaaatcctatctttattggtcctggagtgaaaactggaattgatattcgcattgataatccttctaccctaggagctgatcgcttagttgatgctgctggagcttattatacttatggtggaccttgtttagtcattgattttggaaccgcaacaacttatgatgttgtaagtagtaaaggtgaatttttaggtggagcaactgctccaggaattggtatttgtaccaatgccctttcttcgcaagctgctaaattaccagaaatcgaaattaaaaagccaagtaaaattattgcccgtaataccattcatagtatgcaagcaggaattgtttttggctatattggacaaacagaatatatcataaaaaagattaaagaagaatatggtgaagatttaaaggttatttctactggtggtcttggaagaattattgctagtgaaactgatcagatagatatttatgatgttgatttaacattcaagggacttaaaattatatacgaaaaaacaaagaaaaatctatattaatcaaagaggggatacccctctttttaattttataattgcagattttgtaaatttatcatcatttaaaaaaaacatgttataatgagtttgaaagtgaatggggtgatgaagatgctaaaggttatattatgttgtagtgctgcaatgtcaacaagtttattggttgaaaaaataaaaaatgaagcgataaatgaaaatattcaaatagatatagaagctcaaggtattaatgatattgatgagagaactcaagctgatataattcttttggctcctcaagtcaagtatgctaaaaaacagatagaaaagcttgtctctcctattccagttgctgaaatttctatgcgagattatggactcatggatggaaaaagtgtattttcatatattttaagtcatcttaaacaagaaaaggaataattcatcgattattccttttcttgtttaagattatttttttcttgaaaaagcatatagagtaatttagcttgaataacttcttttgaaaatagtgttaaaaatttggaaatgtccattttttcttcttcaggatataacatggcatgtaagaaacggccaatgatgccttttttactaatattactaaatgttctagatatatcatcagccaaacgtaatgataacatctggaaatcaggatccatatattcttcaaaatcttttaataaatcatctacaaaaatatcaaactgataaacataacttggatcttttgttaataattgtcctaaccaatcaagcgttacataaaggtaatctttttcatctagtggttgttctttatgtgattccatatatttataaactaaattaccagcagaatcatttcttaatagggaacgcatatatctttctaaatataagacttctttataaaactcatgaaataaaggtgtttcaaattgttcaaaagtatattgaacacctactaaatttccaaaatatttcattgcagtctgatagccaattcgcatattacgttgtaaagcatctttagaaaaatccataaatccacctaaatctacataaggtgttgtatagataatatgaggtcgatttaaataatgtttgtgggttgcttcttcatgcatatcaacaacaacaacttcatcggctcccatatctaaagctaaatcaacaggaacattgtcataataacctccatcaataaatgattgattttgaaaattatgagttggaaaaactgggaaacatgaggcactggcaattaaataatcaaagatatattctttttccatctctgatttagtaatgagtagaggctttaatgatggataatggacagtacataaaccaaaatcaattggtgaagatagtaattgatcttcttttaacaatcctcgaattaattcttttaatggtgtaatatcagcacctttttcttttaaatagcttttaaagaaagaaacaacaagatttgattgatccaacattgtatctaaatcaaaattaaaatcaggactaaatcctcccgcaaagactttagaaatatctaaattttcccataaatcttccattgcttgttgatcattttgagccaataaacatccatttaaagcccctatagatgttccagtcactatttgataatcaatttctaattcttttaaagctctcatatatccggcttcataggctcctttagaacccccaccagcaaggacaactgcacgtttcatattacccctcttttctttgactctgttctaccatactttgataaacctgtaaatatgaatcaaattcttcaaatgatgttaagcgatattcccagttaggagagccaattttacctggcacattgaaccggcatgatgaatcacaacccatcatatcccaaactggaataatcacatcattagcttttaaatctaaacaataatgtataatcttctgatacattttttcttcttgataatcttctaaaagcgtttcaacttgttcatattcttcttcatccaatgaagtcaaccaaccaacaagtgtatcattatcatgggttccactataaacaacaactttatcaaaatcaaaatcataatgataatgaaattggaaaacatacattccctttaaatgataataatctcttaactcataaacttcatcccttaactcacctaaatcttcggctaaaatagaaagatcatcaatctttttataaagttcatcaaacaaatcataacttggtccttcaacccattcaccaataactgcagttggttcacttgcaggaatctgccaatacgtatcaaaccctctaaaatggtcaattcttacagtatcatacatttgatgagctgcaagcattctttcaacccaaaaatcataatgatgagtttttaaatactcccaatcataaattggattaccccatctttgtccatatttactaaaataatcaggtggtaccccggcaacgacagatggtgttccatcttcttctaataaaaaacattcctgatgtgtccaaacatcagctgaatctaaaccgacatatataggcatgtcaccaataatttcaatacctttttgatttgcataagtctttaaatcttgccattgtttaaagaaataatattgtaaaaagatatggtaatgaatttctttttcaaaaggtaaaagagaaaatgattgattctttggataatttttatatttatcttcccattcaatccatgatttttgatgattttgttctttaaagacttgaaatatagcatagttataaacccaatcattctcttttataaattgttgataatctacattttcagcaaaacgagaaaaagctaaacgataaagtttttccttttccttacgaacactttgataagcaacaaaagaaacctgactattaaaataagtcacttcttcttcctttaataacccatctttctttaaatcatctaaatccaaataaatttcatcaccagcatgtgttgataatggttgatacggagaattcccatatcctaatggattcaatggtaaaatctgccataactttatatgtgccttagccattttatcaaccaattcatatgcattttcgccaaaatctccaactccataacgatttggtaaagctgaaatgggaaacaaaagccccgccttttttttcataatactctcctaatatcctaaattttcttcaacaataatgactttaatacggtttacttgtttttgataagctaattttacatagcttgaacaaatacgatcaggactatgacaatccatacaatgtccagtcttggtacaaggtgtttttttatttaaacgaatcgcattggctggtgcactgcaatgacggattcttgcgatagcttcttcttcattttgacaaatcttattcaaccctgcaatgacaatgacttcacgtggtccaaaaatcattgcagccacacgatttcctgttccatcaatgttataaagacaaccatccattgttaaagcattggtacttgtaatgaataaatcagcaaagaatgcttcacgaaaacgattcatcaattcttcatttgatagcccttcttcataacgatcaataaaatgaacatcactttctttaatcaaatcaataacccctaattgatttaatgtcacactcccgcctaatgcaaccttctttgattgatttaaaatactctttaaataatgcgttaattcatccctatctttaacaaatagacatgtcatgttattggcttcaaaagccttaattaattctgtttctttgatcctcaataaactttctaaattcttctccatttttctttcctccacatattttatgacaatgcgtacaatcatgacattttcttgatgaaccacgaattgccaaaacgagacaaattcctaaaaagcataaaacaataacatctgctatattcatagaaaaagacttccaatctgataaatcacaaaagccacaatataagccataccagtttgaaataaaacggtacttatcgcttgccaccacgaacctagttcacgttttgttgcagcaaacgcagcaatacaaggcatgtataaaacggtaaatactaaaaatgtaaatgcacttaaaggtgtaaaaatagttgctaaagcgttatttaatgatgttgtcgtagcagcttgagttaaaacagttaatgttgaaacaactgattctttagcagtaattcctgtcattaaagcagttgaagcacgccaatcactaaatcctaatggcttaaatattggagcaacaaaggaaccaatagctgccaaaatactttgactactatcttctatcatatcaaaagtaaaattaaagctttgtaaaaaccaaataacgattgatgcaataaaaataactgtaaatgctttatgaataaaatctttagctttatcccaaacatttaaaacaacattttttatagttggtatacggtaagcaggcaactctaaaacaaaaggtacaggctcacctaaaaagattgtacttttcaaaagtaacgctgagataattgctactaaaattccaatgcaataaatcgtaatcatgacaatcgctgctttacgtggaaagaatgcagcaataatcataccataaataggcaatttcgcactacatgacataaacggagtcaaaacaattgtcattttacggtcacgatcacttgataatgttcttgttgccataatcgctggtacactacatccaaaccctatcaacattggtacaaatgaacgtcctgataacccaatctttcttaatgccttatccataacaaaagcgacacgtgccatatatccactatcttctaacaaagataagaagaaaaataaaatcacaatcactggtaagaaagataaaacgctacccactccagctaaaatcccatcaccaatgagggcacgtaaccaataagcaacatgataatgttcaagtaattgaataatattttgtgatatcattccaataagattatccattaaatcttgtaatggtgcaccaatcaaataaaatgttagataaaatatcattaacataatcaagataaagataggaattcctaaatatttatgagttaatagtgaatctatcttttccgaacgtacttgttcctttgtctcacattcagtaaaaacacaataataacatacttcttcaataaaagaataacgcatatcaaccaaggcagcctcacgatctgttcctgattcttgttccattccttctaagatatgttcaataatatgacgatcattatcattgacatccaatgtcttaaacatgtcctcatcaccttcaatgagcttcgtcacacaataacgtactggtaaatgtaaaatatgtgctttttgttcaacaatatgtgatattgaatgaatggccttatgaacaggtccatgacataaatctaaatgtcgtccaggattttctaatgttttttcaattgctgtaataacatcttcaattccttcattcttacttgctgagattggtacaacacgcattcctaatctttcttttaaaccatcaatatcaatgcaattgccactactaatcacttcatccatcatatttaagacaagaataataggtatatttaattccatcaattgcattgttaaataaagatttctttcaatatttgttgcatcaacaatattaataattaaatctggttgttcttctaataaaaattgaatagaaactatttcttcagatgtataaggggataaagaatagattcctggtaaatctatcaattcaaattcatctttatgttttttaataaatcctcttttttgttcaacagtaacacctggaaaatttccaacatgttgagaagaaccagttaaagcattaaataatgttgttttcccacaattttgatttccgattaaagcaatttttttattcattacaaacctccttgacagcaatcttggaagcatcatcttttcttaaggttaatacataacttcgcaaataaacttctattggatcacccattggtgctacttttctgactttgacttttgttttaggagttaagcccatttctaataaacggcgccttaaaagtccttctccgccaactgatacaatttccaccaatccgcctggtaaaatttcatctaatgtcatctttcatctccacctcattttctatattataactcattttacacggattggaaaccatgcaatgaaaactaaaggaggaaaaagttatactttactctttcctccttactctattttatttatcgtaaaatacgcattgaatttaagattgcaattaaggttacaccaacatcagcaaaaacccccatccacatattagacataccaaacattgttaaaatcaaaacacctattttaatgattaatgtaaaagcaacattttctttcaaaattctatttgtcttatatgagatagaaatcgcatcactgattgtttcaatattatcttgcattaaaacaacatcagcagcttcaattgcagcatcactaccaacaccacccattgcaattccaacatcagctcttgctaaaacgggagcatcattgattccgtcacctacaaaggcaacatatccttgtttttgtgataacaattgttcaacttgagtgactttatcacttggtaataattcactatatacgctgtcaattcctaattgactagctacatcttgagcaactttatgatgatcacctgtcaacataacagtattttttactcctacttttttaagtgactgaatcccttgtttagtcgtttctttaatttgatcagcaacaacaattgaacctgcaaacttctcatcaatcgcaatataaacaattgttccaactcttgatggttcttcaacaacaatattcttttcttcaaagaaagtcgcatttcctaaaataacatgatgttgttttatataaacatctatacctttaccagcaatttctttaaaatcagaaataagactttcatcaatagcttttccatattttttaacaatacttttagcaagtggatgattactataatattcaccataagccccatacattaataaatcatcttgaccatttatttcaacaacatcaaaacttccttttgttaaagttcctgttttatcaaatacaactgtatcaacatcctttaacaattctaaatagtttccacctttaattaaggcccctactttactagcttttccaagtccagcatacaatcctaaaggaattgaaataaccaatgcacaaggacaagaaacaactaagaatgtaagtgcacgatacaaccaatcggtaaattgggcatcttcaaagataaacattggtacaatagctaataaaactgctaagccaacaactgttggggtataaattctagcaaatcttgtaataaatttttcaattggggcttttttacttgccgcattttccattaattccaagattttagaaactgttgaatcaacatagggttttgtcaccttaatttctaagatttcagttaagttaacgactccagccaatacttcttgattttctaaaacttctcgtggaactgattcaccagttaaacttgaagtatctaataaagaatgaccttgaacaactactccatctaaaggaatcttttctccaacctttacaactaaaatatcgcctactttcacttcttcaggagccacttgttgaacaccatttgaagtttttaagtttgcatattcacttttaatgtccattaatgccgaaatcgaatttcttgttttattaacagcataagattgaaaaatctcaccaatagaataaaacaataaaaccgcaactgcttcaggataatctcctatcgcaaaagctccaattgtcgcaattcccattaagaagttttcatcaaagatttctcctcttaaaatattcttaaccgcttttaaaataacatcataaccaatcaatacatacgcaattaaaaaaccaacaaaagaaaaagcctgtgcttcaaataataaacttacaatataaaccaaaatccctacaatcaatgaaagatgatctttaacaacaaataattgaggtttttcaatcactcgactttgattcttataagataaaacgactccatcttcaacttgatcaattgttttttgaagttcctttaacaaaacatctttttcaacatgaccttgaggtttcacttgtaaagtttcagtagaaaaattaagaaccgcttcttcaaccgttgataatttttgaatagcatcttccactttcatagcacatgatgcacaatctaatccagcaatgtgataagaaattgtccctttttcatttaatatacgatgatcttcttcatggtcatgtccgcattcacaatgctcatgatgatgttcatgatgctcatgtccacaactgcactcatcatgatgatgtgtatgttcttcatgatgatggtgatgatgagcatctttttcttcaattgagacttctggttccaatgcttgaataagcttttctaattcgtgtatatctatagcttgattggaatcaataattaacaatccatttgcaaaagaaagtgtagcttcattaatatcttctctttgattaatcatgttttcaattttatgtgcacatgatgcacagtcaagattcttgagtgtgtattttttgatcataaaattccctcccttattcgatcacatgtttatatcctgcatcaaagatctgttgaacatgttcatcatccaatgagtaataaataagttttccttcacgtctgaattttacaagatttgcagtttttaaaattcttaattgatgtgaaattgctgattgtgtcattgataaagctgcagctaaatcataaacacacatttctgattcaaaaagcgcacatataattttaatacgcgtagaatcaccaaatactttaaatagctctgcaacatcataaagtatttcttcatcaggtaatgcttcaactacttgattaacaacatcttgattaacaatcgttgatttatccatgttcttcctccttttatatgaacgattattcatatgttaatatgattatataatgaaatgtttgacaagtcaatgaaatttgataaaataaagtaaacggggtgaaaatatgaaaagattattagttgttgtagattttcaaaatgattttgtaagtggtagtttaggttttgataaagcgaaagcattagaagaccatattgtgaatctcattaaggaatatcacatgaatggtgatgaaattgtttatacgatggatacccatactcaaaattatttagaaacttatgagggggctcatctacctattgaacattgtattgaacatagtgaaggttgggaactttatggtaaagtgaaagacttattacaagattgtctatgctttaaaaagccaacttttccttcattggatttggcttattacttagaaggtaaagaatatgaagatattacttttgttggagttgtttcacatatttgtgttctttccaatgcgattatggctaaagcagcacaacctgatacaccaattcgtgttgatttaagaggtactgcaagtgctgatgaaaaagttcatcaggaaagtattgatgtcatgaaatcaatgcaaatcgaaattatagaataaatgaaaaaaaacttattcatcaattgaataagttttttcatttctttttatttcttgtatgtatttcacataatcgtgtgattcgatatcattttcaagagcagaaacatttctacgattgtccatattaaagacataaacgtaagcttgatcgataatttgattgttttcatcataaatatcacaaatttctttgttatattcattatttggatttccttttccaaaatatccttccatttcatcaatcaatttaagtgttttctcactcacttcatgaatctcacctaaaatcatatcctgaccttctgttatataagctggataagctttacctctaattgtcattaagctacctttgatatatgcatattgtcgaaatgaatcttcatctttaagataaagatcataattgtacataccttttcttaatgttccataaacaaatattttttgtttcattaatgagtcgccccaccagttactttcaaatcaacatcagtatcaacaatagcttcaatcgcagctgttaatgcttctacaattgtttctaatgacatacttggcatattctttttatcaataacttgttgtggtaagaatggaatatgaatgaaaccacttcttttacctggatattttgtttcaataatatgtcttacaccataagttacatgattgcaaacaaatgttccggcactgttagaaacagatgctggaatttgacgttgttgaatacgagcaaccattgccttaattggtaaattaacaaaataagcagctggtccatccgcaaatactggttcatcaataatttgttgtccagcattatcaggaatacgacaatcatcaacattaattccaactctttcaactgtaatatcacttcttccacctgcttgaccaattgataaaacaacatctggattatgttcttgaatagcttgatcaataacttctaatgaacgatgacaaaccgttggaatttctaatttaataatttgagcaccagcaatttcatctggtaattttttaactgattcaatcgctggattaattttttctccaccaaaaggatcaaaaccagtaactaatattttcataatgttcctccttagaaacctaatactaacattaaaataatgtgaataacaatcataattaatgccattggtgcttgtgctttaataaccgcccatttttggtcttttgtttctaagaccgcacaaggcacaatattaaagtttgccgccattggtgtcatcaaagttccacaatatccagcagtcatccctaacgctccaattacagcaggatttccaccttgagcaataacaaatggataaccaattccaattgtaataactgtaaaggcagcaaaagcattacccataatcattgtaaagataaccatacctaaaacatagacaataacaccaatcacaatgtttccagatggcacaacacttgaaataatttgtgaaataacatcaccaacaccagcttctttaaagacagcacctaatgctcctaataattgaggcaatagacaagaagctccaacttgcattaataaacgtgatgtatctgatcttgtttcagaaacctttggtttacaaataacaaaagctaaaacaagtgccactaaacaagcagttcctgtcattactgcaccatctaaagcttgtgctttaataacgccatcaacttcaacattatatttaacaaatgataaagctaatgccattaaaccaattgatacagcaggaataaagattttatttcctactctttcactggctttttgacggaattcaggtgtagattcaacaaatttacccattcttacttgttttgttgcagttaaacatcccatcacaacaagtaaaattcctgtaacaactgaaggaatcattttcccaaacataaagataattcctaataaactccaaaatagtgctgtaccaatacgtgcttcttcattttttgttgcacgaagggcacaatcaaaacttactaatccacataacacatagaaaaattcaggaagataaacacttaaaaattgagtcattattcttttccctccttctttaattttctatcatacaatagaacttgaacaattgttaaaataacagcaatcacagcaatataaatagctgaagaagaaatcattgataaagtaatttctttataacctaaaccaaccaatgttccttgaatcaatacaacaccactagaagcagggaaacagttttgagcaaagaagtttccatagttttctactgctgcagataatcctttaatatcttcatcttctttttcagtcaatggtttttctttatcaatttcagctgctgcctcactcattggtaaaattaatggtctaacaaattgaacatgtccaccaattctaacatttaatgctgaagcaattgaacgaataaccatataaatagataatacttttccagcagacgcattctttaatttaccaattaaataagccgctctctcttttaaaccatatctttcaataatggcaatgactggaaagataattaagaaaatagacatcaatctattgttgacaaatgaatcacctaagattcttaaaatttcaacaaaatcaattccagcaacaagccctgtcacaattccagatacaataacaaccgctaatacatctagtttaagtgcaaagccaacaacaatgattaaaataccaattaaagtcatgtattccattgtttacatctcctttcaaatcatagatagtttccattatagcgaattttcttctttttttcaacattattaagaacttgaataaaaaaagaacccttgctttttatttttcatgactatatgcgcactttctggttatttttaaaacattatcttcaccaggaaaatgaactggattttctcctgattttctaaaaatatgaatgatatccttagcatcttgataaatctctttaatttccatcataccatacattcttggtggcaagatataaaaaggaataggcaaagattgcatttgagcaagtcttttgacataaatataaagatgtggacaacaaatcacaatatcataatcatgcattttatctaaggctaaggaaaatggtgaaaattcaataaagacttcattttccaattgattttctctaatttctttcttcattctctctacaacatagctagaagaaaagcctccaccacagcacaataacattttcaacaattttttcacctcattttttatcttattccttaattttacactattttttatttaaatgcaaaaaatatattgtttataaaataaaaaaagagtataattgcattaactgttaaagggggattatatatatggaaattaaaattgaaagagcaaaaacattaaaacaaaaacctgatcaaaataacttaggatttggaaagtattttactgatcatatgtttatgatagattgggatcaagatcaaggctggcatgatgcacgtattgtcccatatggaccaattccaatggatccagcaacgatggttcttcattatgctcaagaaacttttgaaggattaaaagcttatcgtaatccgaatggtgatatcttattattcagaccagaaatgaatgcacgaagaatgattaattctaataaacgtatttgtatggctgaattacctgaagaaatgtttgttgaagcagttgaagcaattgtgaaatatgaacaagattggattccaacagcacctaatacatcattatacattcgtccagttacatttgcgacagaagctggtgttggtgtgcatccagccaaaagttataaatttgtgattatcttatcaccagtaggtaattattatcctgaaggtgtcaatccagttaaaatttgggttgaagatgaatttgtacgtgcagttaaaggcggtactggatttacaaaatgtggtggaaactatgcagcaagtattgctgcacaagtcaaagctgaacaaaatggttacacacaagttctttggttagatggtgtgcatcgaaaatatgttgaagaagttggaacaatgaatgttatgttcttgattaatgatactgttgttactgcggctttagagggttcagttttacctggtgtcacaagagattctattattcatatcttaaaagattggggatataaggttgaagaacgtgatttaagtattgatgaattgatggaagctggtagaactggagctttaaaagaagcttggggaacaggaacagcagcagttatttcaccaattggagaattatgttataagggtgaaaaagtgacaattaatggttttgaaactggtgaattaacacaaaaactttatgatacattaactggtattcaatggggtcgtttagaagataaataccattggacaaagcttgtcaaataatccaagatttttcttggatttttttatgcaaaaaaacgacccgaaacggtcgtttaatcaataagctgataatactgtaaagctttttcaatcccatcattatcaatagcagctgtaacatattcggctgctttttttaattcctcaatcgcattacccattgctatgctatgagtcacatgttgaaacatacataaatcatttgctccatcaccaaaagcaaaagcatcatctttactcagtgaaaaatagtctagaactttatcaattccatctcccttgtccactccaataattgtcgcatcagcacttggatgaggaaaatgttcattaaaaacaacactatccttaagttctaattgcacatcttcaaattgtgtatgactaggaaaataaatatcaaacatataaccagtgacatcttcatcttgaaaagatgtttgataaaaaccaggtaaatagtgatctattgcatcttgtaaagcaatcggatcttcattttctaaatatcctctttgatggtcaataaaagcaaaaccacaatgatgttttctcatcacttgcataaaatattgaatctgtgatgatgttaatggttcatctaataaaacttggtcatgataaacaatataacgtccattactggttataaatccatcaacaacatcatggaaatattgataagcatattcataagagcgacctgtacaaatcattaataaatgcccttctgcttgtaatttttttaatgcttgttgtgtcgacgatggaatatcatgaccaattgctaacgttccatcaatatcaaaaaataaaattttacgatcttttctcaatgtcctcatactccttaataccgccaacatactttgttgctggacgaataatacgatttgaatagagtttactttcaatattatgtgctatccatccaactgttcttccaactacaaacaacaatgtataaagatcactaggaatatttagcatatcataaactaaaccactataaaaatcaacattactacaaacatgaatacctttacgttgataaatttcagcaatcgcaattttagcaaatctttgataaaaatcaaattcatctaagcgatttttttcttcagcaagttctttacacttttcagccaaaatatcactacgtggatcacttaaagtataaacagcatgaccaattccataaaccaatccactaccatcattaaattgtttatctaaaatacgacagataatatcatgaatttgttcatcactggcttgaagtgaaatttcctgaatgactttttccatttgttgtttaacggctaaattggctccaccatgacgaggtccttttaatgacccaattgctcctgcaactgatgaataaatatctgtaccggttgaagaaatcacgacattagtaaaagttgagttatttcctccaccatggtcagcatgtaaaaccaaggcaacatctaatacttcagcttcttttttactaaaagtcccatcatctcttaataatgctaaaattgtttcagcaatactataatcttgatgaatatgatggataaataaactttgagcatcaaaataatgaactttggtttgatatgtataacaaaccatactaggcattttagcaagtaaatgaataccctttaataatgtttcttcaattcccacgttatcaggatcttcatcatagttatataacattaaaacttcttgttgtaatttattcattaaattcttggctggaaaacctaaaatatttgcctctaaataatgtggcggtaattcataatttgaacttaatatttttttaaatttttcaaattcttcctgatttggtaaataaccaaataaaattaaaaaacaaacttcttcaaagagatatctcttttcatgacacttcgcttcgataatatctctgacattaattccacgataataaagacgaccatagtcatcaaccttttccccattttcttttttatatccgacaacatcagaaatttttgttaaccctactaaaactcctgttccatcttcattacgtaatccctttttaacagaatatgttgtatataattcattatcaatttgattttccgttaaagatttttcaaaaaaatctctaatcttttcttccatatcaatcacccctcttatgatatagattattataccattatgttgtataattgtatacaataaattatttatatcatatctggtactttataattaattttcaatacatcaaaccatctttgttttttatccatttcacaatttataccataagctttatataaagtcgttccctctttaacaatataccaaacttgatctttatcagttttaaaacatgtcactcttgaaacatcagaaatatgtgtttctttcttcttaacaattttttctaccttcatactatcaagcaagtctacatatttttgactcgcattatcttcattattcatataaaaagtttcaaaacttaaagaatagacatcttgataatcaggcgttaaagttctcgtgtgacgaatgcatccttcatcatttcctgcatcgccatattcatcaactttcatacaattaggatattcggttaaacctaaatacttcttgtattgattgccactcaacacaatcgctaatgcacaaatagccacaactgcaatgaatacagatgcaatggttttcacattatgcttgtaatgttcgtttttcataaaaaaacctccttatattctcagtttatgacgattatcatcaaatagcaatcaaaaaaggtttttttataaaatccatccaaaatggcgacaagcatattctattccatcatcaacactggcctttgttacaaatgttgcctgtgcttttaacggttcacaagcatttcccattgctatattggtccattcttttttaaacattaccaaatcattaaaatcatcaccaaaaacaacaacatcttctttttttccattgactctttcaatcattttaaggattccttgatctttttcatcatgttggtaagttaaacatcctggcataaaacgaatatgccctaaactatcttttaatgttaatcgatcttcttccttaggagaaatcgcaatataaatcttatatatgttttcaatatcttcaaatttcatagaacgatttaaaatataacgtgttggttcttgacgataaccaatctgttcaataaaacgctcatctttcatcacaacatcaagactatcacgtggtgatattaaaataccataacctaatcgatcagcttcatagcataattgaacagccagttgatgatcaagtggtctattttcaatcagttcatcattgattgtcaatgctgccccaccattacttactatatgatgaatacccatcttcttagcaaattcttttgtcttataataagctcgtcctgtcgcaatacatacaaaatgtccttgagcttgtaattgttgaatagtcattttagcactttcaacaatttcacctgtttctttatttgtaagtgttccatcaatatcaaagaaaaaatactttttatccataattaacctcccatgctattatatcaaattcaagttttaatgagaagctttatccttagcatctaaaatactataaataatattcatatgaataggtgaaagaataatcccaatcaagccaaagaaatataaatgaatcatcatagataaaagcaaaagaaaggatgggatttgtaattgtttattcataatttgtggttctaataaactccttacaacattaataatcaaataaagcaaaaataaatatagcgcttttaaataaatccccttaaaaagataaaacaaacacatgggtaaaataacaatcccaacaccaataaaaggtaaactatctaaaaaagcagttaataaagcatataagagggcattttggaatcttaaaacagaaaagcctatccaaagaataaaaaaacaaatcaccattaaaatcaattgacactttaaataaatgcctagactctttaaacatttgtttttaataaaaataataaattctagtgtatggtaaggaaaaatctgataaaacttcttttttatactttcataatctataacaagaaaaaaagaagaaataataaataataaaaaggaaaaaaagaaagtgggaatacgactcatgatttgtgataaaaaagtcattgtataaaagatactattttgtaaaagtgtttgcagataagccagaacatctttattttttaaccaatctgcttgatgaaagtatcccattatctcattgaaaaatggttcaataatattgacataatattcaggccaattttttatgagttgcatgatgaagaaaaagccatacgtcacaataatcgcaagtacaaatagaatcataaagtaaaagacaaccaataagataatccctatagaatgtctttgcatatggattctttgatcaaaatagtcaataaatggtttcatgacaaaataaaaaagaattgccaaaagaaaaggaaaaataacatgcagcatatatttaagaatcaaacaataaataatgataatgaacaatatcatatatttctttttcattttatcaccacttcattatatgtataagaaaataaaaaagccctaaatgggcttaattattcacatgttgatgaaaaactggtgttgaatcatcaatagctttaaatgtatatccttttttctgataatgttctatcactttaggcaaaatatctacagtattttgtttcccattcgcatcatgcattaaaatcatgacttttttagccgaagatgaggttgctctttttaacatttgagattgactcatatgcgcataaccatcaccattctcacaattccaatcataataaatatatccttttttaccaacttgctttgtaagttgactcataattcctttgttatattttcgtgaaattgtatttgatccaccacctgggaaacgaatatattttggggtaaaaccaatatattctttagctagtttaccaactttatctaaatctttaaaataagcatttgttgaagcataaactttagaataattatgcgaataagtgtgtaatccaatggtatgtccttgatcatatgctgttttaatatacggacgatatttttcattcataccagttataaagaaagtcgctttacattgataacgttttaaaatttctaaaacttctggggtatgacgagatggtccatcatcaaatgttaaataaacaactttttcattgtctttggttttatcaacaacttctacttgtattgttttttctgattgattgccggaaacatctttagcaatatatttaacttgataagttcctatcttattcgtatctagtttatcactttctacttttaaagttggattcttatcaaaatcatctttaattgtcgctaaagcttttaaatcaattttttccccaacaacaacattcgcattgccaacaataatttcaggtgccttttcatctttaacaacattcaccttgactttttttcttgtatcattatcatacgcatccttaacaatcacttctatctcttgccaacccactttattaaattcatagtttttagcaaaagatacttttgtttgactagcgtctttaatattcttaacaaactctgatggttcaactgtttgatttaaagcaacctttttagatttgacatcaaattcaggaggcaatgaatcaacaacattaaccttcaaagttttttcttcatctttatacttataaacaactttatattctccaacttttttaacattcacttgagaactatctatcttaacatcatctttcttaccatctttaacataatctatgaaacgagaataatcaacaactgtattgacttcaatctcatgattacttataaaatggatagatgattgattaataacgaaataaccaattcctatgacaagaattgctataataatacaaattatggctataaacaacttttttcgcggtttcatataaattcctttctatttttttacctttcttcgacaaattctacaaaattttgctcaatatatatgctataacttccaagggtgattttcatgtacatatataatttaaacaaaacaaacaattcttctctacctattttggatcctgattataattatgatacattatattctaaggaaaatatgcgagatttttttaaatccattcaaaaaccagaacagacaacatttattactggaatttatattcaatatcatataactccttatctatatgaaaaatttccagacttttactatcacttttatcaaccaattgaagatagtattcaagaacattttaattttgattatgcaaatctatattctgaacgtagtgatagttattttattgttacttttaatataactgaacaagaaatcagcaacgctattgataatctctatcaaaagcttgctcatcaaacttttacttatcatcaaaatgagtgtgaaatacaactcaaatgtggtgtttatttttctcatgtaagaattaatccatttgatttttatcaagcttctaaaaagcagtttgatgaaattctttgtaaagaacaatcttttttatctttacaaaatcttttaatggtgagataagtagacgtcatatcttttcataaaatagtgaatcatttttcttaacaatccaatcacgaaaactgcacttgcacatagtggaatagtccaaataacgcgccaatttaacaatggataaattccaaagaaatttggcataatcaataaaatacaataaaacaatattgttatgacacttgcaagtgtcatacgtaaacgattgagtggcatacacacaataaatacaactaaaaaactaatgaatccagcaaccaagaaataataagttgaatacattttagcatcaaagtgtaaccactgacctataaaaccaattgccaacatataaataatcattgttaatgcacaaggtaaagcggttgaaacaacatggcgtaaaaaaccttgtgatgataacactgatgaacgttctaaggttaataagaaacttggaataccaatagctaatccactaattaaacttaattgtaatggcgtaaaaggataactcattcgtaaagctgcaaaaattaaacaaagtgctgttgaatagatggtttttgttaaataaagtgaacttactctttcaatatcagcaataattgcgcgaccttctttcacaatggcttgcatagaagcaaagttagaatctaacaaaacgatatgggctgcttgtttggcggcatcacttccagctgccatagcaattccgcaatcagcatcttttaaagccaaaacatcattcacaccatctccaaccatcccgacaacttgaccaagagcttggcaagcacggataatttgttgtttttgttcaggttttacacgcccaaagacacgataatgagcaactactttttgtagttcttcttcatcatttggtaaggttgaagcatcaatataacgctcaccattctttaatccagctaaacatgcaacacgtgatacagtcattggattatcaccagataagatgcgcatttcaactccagatttttcaaaaaaagccaaagtttctcttgcttcttgacgaatgcaatcgtgaattaaaacaagggctactggaacaacctgaccaatttggcttgtttgttcatcaactaagtcagtttggacaagcaataaaacacgtaatccttcttttgagtaggtttctacctgttttaaaacaggatgattttcaggtaataaatattcaggtgctcccattgcataaccaccttgtttttcaaagcaaacagcgctcattttacgctgtgacgaaaacggaatcagcgttttgacatcataaccctcaactctagaaaaatgatgttgtaaagccaattgcgtcgcattaacagcatcaaaactataggccattgcacttaagacacgattaatctcatcaatatcttgtttgattaatggtatgattttttcgacttctaactcccctgttgttagtgtacccgttttatctaaacatagcacattaactctagcaagggcttcaatagcttccatttcttgaattaaagcctttttcttggctaacttacccactccaagaataaatgataaacttgtcaataaaaccaagccttcagggatcatcccaatcacgccaccaacagtcttaacaatcgctgatgctcgatcatcaggaaaagctgcaagttgtgatataaacaaaaccaaaccaaccggaataatcacaacacttaaaactttaatcactttgccaatcgcatctttcatctctgaagatgctttatttttatgtttagccttatgaacaagctgagtcgaataattatcatttcctactctaatcacctgtgcataggcgcttccagctacaacaaagctacctgcaagtaattcatctccatgatttttcttaactggttttgattcaccagttaacattgcttcattcacttctaaaccttgtgactttaaaacaatactatctgaaccaatctgattcccactttcaatataaacgacatcatcaacaaccaatttttcaactggaataaccgattcttgatgatttctgataactttaaccttcttaactgtcacaacagttaattgatctataatctttttaactttcaactcttgatagattcctacaacagcatttacaatcacaacaaccataaaagttaaatttgtccatcgaccagtcgataaaataatcccagctaaaaagacatttaaaatattgaaataagtcaatgtatgttccatcacaatctgtttctttgtctttgaaatattatcatgtgaaacattaacttgtccattatcaatacgttcttgcacttgtgaagttgttaatccaaaattatctattttttccatatcatcttccacccacgtcaacaatataacacaccgttatgaatattttgtgtatccaatcacaaaaaattagtatacttatcataccatattttcccataaaattatagttagataaaataaaaaggctgaaatcatattgaatcatcaatacaacttcaaccttgaacattcaatggtggaccctgaaggactcgaaccttcgaccgatcggttatgagccgatagctctaaccaactgagctaagggtccttgataaaataaaaagtggttgatcaccacttataagcttaatggtagcggggaagggattcgaacccccgacccaccgggtatgaaccgattgctctagccaactgagctaccccgccatgtagtgaatcgtttttgtttttaaagtaatggtggttccggccggaatcgaaccagcgacacgaggattttcagtcctctgctctaccgactgagctacggaaccataatggcggtctggacgggactcgaacccgcgacctccgccgtgacagggcggcattctaaccaactgaactaccagaccatttggttgcgggagaaggatttgaaccaacgaccttcgggttatgagcccgacgagctaccagactgctccatcccgcgatatgtaatattctttttttaaaatggcggaggttgagggattcgaacccccgcgggactttcatcccctgtcggttttcaagaccgatcccttcagccaggcttgggtaaacctccgcaattaatggtggagcttagcgggatcgaaccgctgacctcctgcgtgcaaagcaggcgctctcccatctgagctaaagccccattaaatggtcgggaagacaggatttgaacctgcgaccccctggtcccaaaccaggtgcactaccaagctgtgctacttcccgttcaattcatttttcaaaactcaattggcgcgctaggcaggaatcgaacccacaacctcttgatccgtagtcaagcactctatccagttgagctactagcgcatctctttaacagcgcctctatactatatcatatccgctgttcttttgcaacactttttttacattttttcaaattctttttttgaagaatttttcaagaaatggtgcccagggccggagtcgaaccggcacggattttaaggtccgcaggattttaagtcctgtgcgtctaccaatttcgccacctgggcaacagttggaggttccagccggactcgaaccgacgatgacagagttgcagtctgtagccttaccaacttggctatggaaccgtttttgtttctctctttctgttgctcaactagtatataatatttttttaatgattgcaagacctttttgacatttttttctttttaatttttgcaatcataaaaaaataaagttctgatgggcattttttcatcagaacttttttaatttttttattgtgctttgacttttgtccagtatgaactatacatttctttgatattttgaggctgataggcaaacacttcatcatttttgcccattcttatcccatatgcactaatcccgtcaaaatcgccttctgaagcctctttagcggcattgacattagaagttaagtatcctacttctaacgtattatttaaagcattctcatcattaatcatataattaataaattccatggctaattttgtttctttacaatctttactcacgacaaaaccatcaaaccatatgtttgttccttcttctggcatataaaatccaatatccgaattttctaacatgactgatgctgcatcacctgaatacataaccgccatagccttttcaccatttttcatagcatcaattgtttcatctgttgcataagttggatccattgtttgacgttgttcaacaagccattgataagcatctttaacttctttttgattcgttgtattcatagaatatcctaaagcctttaaagccaccataaaagaatctctttctgaatcatacatatagatatttcctttatacttaggattacgtaaaacttcccatccagcttttaaatctttttctgaaacttgtgtcttatcataaacaattccaacattcccatagaaataaggaacccaataatcattattcttatcaaaattttgatttaaaactttactatctaaacttgatttagatgtaatcaaagaccaatcaatcttttgtaatagattttctttaatcaagcgttcaatcatatattcagaaggaaccataatatcatacttgtttcctcctaataattttgtatacattgattcattagaatcaaatgtttcataaataactttacaatcaaattctctttgaaaaccactaatcacatcaggatcaacatattcaccccagttaaagactcttaaagtatgagaatagctacgtgacccacatccacttaacattccaaccacaagagttaatgctaaaataattttaagatgacgcttcatttatgcttgctcctttctttttaacaattaaatatggaataaatgttccaattaacaataccaataaaataacaattaaaacaatcgtcgataaagcataaatacttggattcatacgtttagacatgttataaataacaatcgaaatattttcaacaccattaccactaacaaaataagaaataacaaaatcatcaaatgacatagtaaaggctaataatgctcccgcaacaatcccaggtttaatttggggtaaaataaccttcatcaaagtttgaaatggcgttgcccctaaatccattgcagcatctgctaaattaggatctaattgtttaacttttggataaacatttgtaataacataaggggtacaaaaagcaatatgagccaataacatcgtcatataacctttatcaatattaataactgagaaaaagatcattaaagaaatcgctgttacaatttctggattcatgataggtaaattattaacctgtaaaatcgttgttcttataaccttcttagacttcgttaaagcaattgctgtcattgtccctaaaattgttgaaataaccgttgctaaaatcgcaatactcacagaaactaccacagcatctaataactgtaaattcccaaataatgactcataccagcgtaaagaaaagcctttaaagttagataatgacttggcactattaaacgagaaaaatgccatgacaattaaaggaaagtacaaaaatgctaaacataaactaatgcaaagtacttttacgtattttctttcttttaccatttcttctacttcctccttcctcatcttcattagacatatttgtacgcttttcagccttataaataagtgccatcaaagcaataacaataacggctaaaacaagtgaaaccgcactaccaaaatgccagtttccaactgtaataaattgttgttcaatgaaattaccaatcaatgaatattgaccgccacctaacatcttaggaataacgaaggcactaatcgctggtaagaataccattgttaccccagttagcactccacttaatgatagacgaaaagtaatcttaaagaacgtttgtacacgtgatgcccctaaatccatagaagcctcagttaaagacttatccatatttgtaagggatgtatgaataggcaaaatcataaatggtaaaaagttataaaccatcccaattacaactgaaaaatcagtatacatcatatgcatcttggcaaatcctagcgcttgcaaggcatggttgattaaaccattattacttaaaatactcatccatgcataagttctcattaaaagattaatccatgttggaatggtaattaataaaattaataatgtttgagttctttcttgacactttgaaatcatatatgcaattggatatccaattaataaacaaatcacggttgttaaaatacccaaaacaaaagaacgcatcaatacagataaaaagattggatcaataaatctaaagaaattatctaaagtaaatcgaaaagttgtaatttctgttccttttgcagtaaaagcataaaacgctattaacaacataggaacaattgttaaaacaaataaccaaaaacaatatggtgaaacaagcttcttatactgtttcattaatatgtccccatcttttccatgacatgaatatcttcaggccaaaaatcaagatttactttttttccaatttcactcatatctgttgtatgaactttatacatacgttcacttgtttctaccataatttcataatgcacacctttaaagataattgaagatacaacaccttctatctttccttgaccaacttcaacaatatctaaatcttctggtcttaaaacaatatcaacttcttgtccctcatcaaaacctttatcaacacaaacaaattgttgtccatcaaattcaactaagaaatctttaacaaatattccctcaacaatattagattccccaatgaattgtgcaacaaaacgattttcaggttcattataaatatcagttggtgttccaatttgttggattgccccatcattcataacaacaatcgtatctgacattgtcagtgcttcttcttgatcatgagtcacataaacaaaagtaatcccgacttctttttgaatattctttaattcaatttgcattgtttttcttaattttaaatccaaagctcctaaaggttcatccaataataaaaccttaggttcattaaccaatgctctagcaattgcaacacgttgttgttgtcctccagataattgtgaaatattacgtttttcaaatccctctaatcctaccaaagataagattcttaaaactttttgttcaatgacatctttttccatctttttaatttttaaaccaaaagcaatattatcaaaaacattcatatggggaaataaggcatatttttgaaaaactgtattaacttctcgtttataaggtggaagcgttgaaatatcaattccatcaaataagacttcccctgaactggcttcttcaaaaccagcaacaattcttaatgttgttgtctttccacaaccactaggaccaagtaaagtcataaattcattttcatgaatatctaaataaatgccttttaaaaccacttgtccattatactcttttgttaaattatccaattcaatcaattttttcatttcatttcctcctaaaataatggtggtgtagaaacccaaattacttttgctaaagtatcataaggattttctaaataatgtgttctttttccactgagataaaaagtttcacctttttttacaatcaattccttatcaccatagtgtaatttaactttcccactaatgacataaccaaattcttcgccatcatgaggttccatctccattgaattcttccctttttcaagttcaattaaaatgggttccatcgcatttttttgtgcattaggcacaatataagaaattgtaaagtcatcttgcatattaacaaaataatcgtcttttttaaaaacaatttgttcttcttgtgtttcattaaagaaatcatgcaaggtggtgcctaaagcttctaaaatatcctctaaggttgcgattgaaggggatgttaggtttctttcaacctgtgataaaaatccctttgttaactcactccgattggctaattcttcaagtgttaactgattagcaatgcgcaatcttttgatttttcctccaatattcataatctctctcctttgtttagtaataccaaacttcatgtttaaatctacaaaacataattattatacaaaatatgactaaaattgcaacatatttttaaacaaattgtttaatatattaaactatagaattaaaaaaaagtaacctcagttacttttctagtttttctctacgttgtgatgacttttcaaacattgtttttaaggcttgttcatcttgattgattaaagctaattttaattgatcaaattctttttcaaaacgctgcattgaagctaacagataatcacgattatttaaaaagagttctgcccataaatctgcattaatatttgcaattcttgttaaatcacggaatgaatctccaatatatttaccagtttcgtatttttcatcatcactattcattaatgcaacagcgatggtatgaggcaattgagaagtaaaggaaatgatttcatcatgagcataagggctcatgatttttacgctcttaaagcctaattttgaaacaaaatcacacatataggcaatctttgttttatcattttgaggatgttcaatcacaatataattggcatgatagaaaacttctttgctagcataagcataaccttttttctcacgtccagccattggatgtccactgatatattctacatctttatcgataatcgataaggcctcttgtaaaaaatatgatttaattcctacaacatcagtaacaatactgcctttttgaaaagtatgatttttaataaaatctaaaaccaaagaaggatatagacagataattgtcatatcacttttggcaataatatcatgtccatcgacatatccttctttaatataaccttgtttcttggcaagggctaatgtttcttcattacaatccacaccatagacatcataacctaagccatgcatagcttggacataacttccaccaatcacacctagtcctactactgtaataatcatttggcacctactattctgttttgccaccttcggctaacatttttaatttataatctaataatttcttagttaaatcaacataataaatatgagggtattctaaacggaaaacttcatcccataataaagctttttgttttgttgaataagctctaatttcttctaagctatactctggataaacacattttccttgatcaaaaatcaattcttgtaatggtacaatttcataagttcctgcataaagagttttatttttccatgcatctgattgatgataaattgttaaatcttgtccttcatctaagacttcatcatggaaagcaatgatatcagcaattgctttattggtttctttttcaattaaacgataaactttcttgtatcctgggttggtaattttttcagtgttttctgagattttaatctttggaataatttgaccatctttttctacagcagctaatttataaactccgccaaaaactggtgctgatttagagacaatcatgttttctccaactccaaaagaatcaatttgagcaccttgttctaaaacagaacggattaaatattcatccaatgaattagagaccgtaattttacaatcatgtaaaccagccacatctaacatcattcttgctttctttgttaaataagcaatatctccactgtctaaacgaattccagctaatctttttcccattggagctaaaacttcttcagcaactctaattgcattaggaaccccgctctttaaagtatcataagtatcgactaataaaacacatgaatctggataaatcgttgcatacgctttaaaagcttcaaattcactatcaaatgattggacaaaagaatgtgccattgttcctagtactggtacgccaaaagcaactccagcagatgttgtagctgttccagcaaccccaccaatataagccgcacgtgcaccataatgtgccccatcatatccttgagcacgtcttgctccaaattccataactggtcgccctttggcttcttgacaaacacggtgtgcttttgttgcgattaatgattgatgattaattgtaactaataagaaagtttcgattaattgtgcttcaattaattttgctttaacagtcactaatggttcataaggaaagactggtgttccttctttgactgcataaattgttcccgtaaatttaaagtttcttaaataatcaaagaaatcctcatcaaaaatatgtaatgatcttaaatattcaatatcaccttcactaaagtgcatatcttgaatcgcttcaattaattgttgaagtccagcaaaaataacaaatccaccattatctggatttttacgatagaacatatcaaaataaacaatttgttccccttttcccatcttaaaataattatatgacattgttaattcataaaaatccataattaaagtaatgtttctttcactactaacattcattttttccattttaatgccccctgtatcatttttactatcatataccaatttatcaaaaaaataaagtttttttgtgtattgacacctttattgtcagaaaaaaatccttatatttgcataaggattatcgtttcgcttcttcaaaagctttttttacagcatctttgagagcttgtgaagttttagttgctcctgagacggtatcaacatcatacttattattgtctttcatgtttgatatcatctgttctatagcaactccaccaatcgatggtgtttcattatgttcttttacaacaacatcttctatcttatcgtttttgatagttgttgtgacttggaattcaccaccatagccattggctattgtttcatattcaccatctttataagttgtttgtttgactgtttcttttttcttttcatttgcacaaccacatatcaataatgataaacataggatcatgattttcttcattttttctacctcctatttatagttttcgcttgatttaaaaagttatgcaaaaaaacctcataaagaggttaaaaatataaatcataagattgtctttgatatggttgaggcaacggttttactttttgataaacaattggaataagcaattgttggtctggatgaatcatcatatcatcttttaagttattcattgcttgaatccatgcaacctcactattaaacgtttttgctaaacgataaacattgtcacctttattgacactatataagataatttcacccacttttggatatgtgattctttcattttcatacatattgtcatacatatatggattatacattttatccctcctaaaataacctatgccaataatgaatttgtgtctaggcgaaaaaagaaaaaaacgagatttctctcgttatttattcgttgccattttatttaatgcatcttttgccgcttgttgttctgcacgttttttacttgttcccttaccaattcctaaacgcatatcatccatcatgacagcgacagtaaattctggagcattggatggtcctgaggtttcaagtaattcataagtcaccgtacggcgttgatcagcttgaattaattcctgtaatgttgttttataatctgtaatatcatcatagtctaaatcattaacatgttgatagattgtttcttctaagattttaatgacttcttcttttccacaatctaagtacaaagcaccaataaaagattcaaaaatgtttgctaaaacactttctctatctcgtcctccacttttttcttcaccaacacctaaataaagcaattctccaagtcctaattctttagaaaaacgagcaagcgattcttcgcggacaagtttactacgtaatgttgtaagagttccttctggaacatcggggaaaagtttaaaaataaattctgatacatataattgtaaaacagcatcacccataaattctagacgttcatagtcctttttcatatgatgtgattcattggcataagaagcatgagtaaatgcttctttatataatgaaagattatgaaaaggaatttgttctttttgtaagaaatctaatattttcatttttcactcaatccttctttcatttgggtaacaacatctaatttgaccatttgataagctaaatccattgcattagcaaatgccttggcatcacttgcaccatgagctttgacaactgctttttcaaatcccatcattaaagctccaccaacagatttataatcaaattgatcttttaaagcatatagagatgatttagcaaacaatgcaccaattttcccacttaatgatgacatcatactttctttaatcatcttcatcaaaatagaagcagctccttcacatgtttttaaagcaatatttccactaaatccatcagtaacaataacatcgcaatcaccttttaaaatatctctaccttcaatattcccaataaaatcaattttattttctgattctaaaagttgatatgccttttgatgaacttcatcaccctttttattttctgttccaatatttaataaagcaacttttggtgaagcaatacctcttatattttttgcataaatatgtcccataattgcaaaatcatgtaattgttctggggtattttcagcattcgctccaacatccaataaagcaacacctttttgattatatgttggtaaaacagccattaaacatgatttttcaacaccttcaatacgttttaaaaataacatagcacttgtatagaaagctcctgtggaaccacaagaaaccaccccatcaacaattccatcattagctaaagtcactgctttgaccatgcttgaatcttttttacgacgtactgacataatcccagcatccattggaacaatatctctagcatcaacaatatgaatacgttcatttgattgtaatttttctaattcttcagcttttcctgtgacataaagttcaacatcctgatggctttgcatgaacttttcacaagcctctacaacaatactgcttcctaaatcgccactcatggcatctattgataatttatacatatgataattcactccttgttttctaccctattatacataactatttatatttttcaatgttttaaatcaatcaacatactgattattctcttttaaactttctttaatctgattcataaaatgtaaataaccaccttgatgaagataatcatcaataattttcattgcatcttctctagcaacgcttaagatagggaaatcttttaagacatctgccaccaagaaagttggtaaaccactttgcttatttcccaaaacttcacccggacctcgcatttgcaaatcatacattgatatttcaaatccatcatgactcttttccatatactttaatctttcaatggcttctttagatgttgatgaactcatcaaataacaataagcttgttgacttccacgaccaactctcccacgcaattgatggagctgactcatcccaaaacgttcagcattataaatcaccatcatattggcatttttgacatcaactcctacttctacaacagttgtagaaaccagaatttgaatttcatttttttgaaaggcttgcatgattttttctttttcttcatctttcatctgaccatgtaataaaccaacctgatattgatttttaaaataattttgcattgctgcggctatttgtgaggcacttttagcttcaatcgcttcgctatcttcaacaagtggacaaatcacataacattgacctccaattgctagatagtctttaagctgttttaaaatgggtttcatggatgatgatttaatatattttgttataacaggttttctgcctactggcattgtttttatagttgagacatccatgtcaccatacatagaaatggctaaagttcgtggaattggagttgcactcataattaagaaatcaacttgctttcctttgtttttcaaggcttttctttgttcaactccaaaacgatgttgttcatctgtaatgacaaaaccaagtgatgcatattcaacttttttttgaaataatgcatgtgttcccacaacaatatcaatttcatgatgactgatttcttcatataattgatttttttctttcattgataaagaacccgtcaacaaagcaatttttacatcagttgctttaaaaaagtcacacaaagttgcataatgttgagctgctaagatttctgtaggtgccattaaagcaccttgatatccagctaaataattggcatacaaagccacactactaacgactgtttttccacttcctacatcaccttgtaaaaagcgatacatcatttgagaactctttaaatcttcaatgatttctttaatggatgtttgttgatcttttgtcaattgataaggtaaagctaaaataaaatcttgtaatttcattgtatcaaaactttttgctatacctgtttcttggtttctttgttgtttgataaattgcatagttaactggaattttaaaaattcttcgtattttaaatatcttaaggcttgtttaatatcattttgagtttcaggaaaatgaatattatatagagcactttctttatgaataagttgatgtttgatgatatattcttcagggacatatgaaataatctgtccttttaaatgctgaaaagcttttttgacatattgttgaaaagctttttgggtcattccttctttaattgaatagataggatgaatgccatacagttcacttagtggtttgatttttatgtcggttgctgtaattttatcattttgacatttgccaacgatagttatagtcgttgacatttttaagtattgtcttaaaaaatgtcgattaaagatagtcacttgatattgatgaagatagtgatcttctactatgaatgacattcttgacattttccctttaaagaagattttagttggtgagataattgttgcttcaataatgattttatcatcttcgtcattgggataagtttcttcaatgatatcataacgataaggataatgattaaggacatcttctaaagaagtgatattcatagtttctaatatttgatatcttttttcagttgtttttaataatttgatatctgtcattatcccaccaccttgttacctattttacatgaaaatatgaaaaaaagatacccaaaggtatcttaaattaaatagaaatttaaattagtgtggggtcaacccttcggtctacaattccgtggggtgtccctttttttatctctaaattttaaaggggtctccttcatattaaaaaaatcctttcatgatatgatatttttgcagaaacaaccatatatgaaaggaaagttttaactcatggattatgatactataaatttacttggtttacaacctgatgatattcaagatttaaacattgcaagaactgataatactgtttttattaatgtcactttatccagaaaaattaagccttgtccctgctgtggcagcttaaatgcaaatatcaaggattacaagattaaaaaaatcactcattctattttcaacacaaataacacctatatcaattacagatgcagaagatttatatgcaatgattgtcataagtcttttcttgaagataatcctttcattgctgctagacaaagaatttccaacgctacaattatacaggttctcaaggactgtaagagattgaattatacctttacttctattggtgaaaaaaatcatatctctacttcttctgttgtcaatatttttgatcaatatgtcaccatgcgtcctaacccacttcctagagttctttcaattgatgaattttatctaggcagaacctgggataataaatttgcttgtatcttcattgattgggaaacaagtcagattatcgatatatttccaagcaggaaaaaattcaagctctattcttatatgcagtacatcaataaaagtgaattcaataatgttaaatatgtaagcattgatatgaacacaacctacagagattttgcctatcatcattttaagaactgtattgtcatggtcgattcatttcatgtcgtaaaaaatattaacgatgcattaaagaatgtacgaattcatgttatgtccaagcaagatagggacagcgttaattattatttgctgaaacattggaatcaccttctcatgaaacgaaaaggagacattgaagataatattcctcaatacaataagaaaatcggctatgccataaacaagcctcaaatacttgaattgatgctcaagattgatccattattaaaaaatgcatatgaatggaaagaagactatcttgacttcaaccaagactatacatataaaaatgcagctaagagatatgatgaattatataatgaattagtcaagttgaatatgaatgagtttaaggatgttgttggatttttaaaaaactggagaactgaaattttgaattctttcattcttattggtcaaagaagaatatcaaatggtccaatagaatcaattaacggaagaataaaagttcttttgaaaacatcattaaaatataagaactttgaaagattaagaagccgtataatgtactgcataaataaagattccttacctctattgacaaataaaaagaagacaaatagagagcctggaaaagaaagaggaaattataagaaaaataaagaataatcgttagaaacggttgtttctgcataataaaagtatcattcttaaccccatggttttgaatgatactttattcactttaaacacatgtggggtcaataaaaccccacgttatttttgagtctcgtttttacaaaccccgcggaaatttagagacccaattaaattaattattcttcaaatcatcatatatagattttcttagcttttcaacataatctttaattagagtcattgataatacatcatttttaattatatttttaatatcactaaattgatcattaatatataatttttcatattcttccttacactctctcaaatattttattaaagaatttaaaattcctggatttttaaatgaatcagacataatttcctgcttaccattttcaatataggaagtatatatatcatattgtcttaatgattcacctacaaataatttttgatcgaatttattagttataaagtttgatagaattcgaacaataacataattatcataaatatctgctatattttccacaccatatgattcaagaatattatcaagataaatcttaccatcaactccaaaaaacaaaatagcaaacaaatcagcatatgactcagaaaaaatttcaaaaatgtcatcaataacactaacataaccttcttcgagaaataatttctttgaattatttttcaattttactataatatcaataacatcattagaacattgttgcatatcaatttcatcatcaaaatccatctttataaacatatcagttttaaatgaaatatctgtcaacaaagaaaatgccgctttttgtataatatgcttcaagttcactgaataagtccataaatccactgttcttgtcatgttattaatatatgattgaatttgtttttgaatattatttttgacttcatatttagatattttattttcatctataaaatctaataaaacatcaaaaaagtaatattcaaacgcctcaataatatatttagctcttttctccctacaacgtaccttttctccacaataatggctagcttcatgacataaagaaaatatcattatagatggattataaaaatatttcattggaatattaacaagtaacaaacgattattaatttcttcatcaaataaaaataatcctaaaatcgatacattattatttaatgatggtcttatacaataagtaaactcaggaattgacttttctgagtccatttctacattaattatcactttattaaattcacaaagaaaagaagaataaaacgcaattaattctgatggagtcaaaatatccttgccaatatatgtttgtactggataatgtccgaattgagtcgcgtcactaacattaataatatcccttgcagcttcaataaaatacattgtacactcttctatttcatcatgcatatcttcaatatccttgctgattttttctagaaattttttgagtgggtaatatagagataaaaaacaataatcaggtaaatcataatataatacatacttcattgaagtaataattcttattaactgagttttataaaactcatctatataaggacaatttaattgaattttttttgtaaaaccattaacaaattcagttaatttattatgatggatatatgaatattctttattatcatttgaaattaaaaattttaaatttgtcgaatatattgctccccctctattattagaatcaattgcaaatattccatgactacgataaagagaaaataaaaacttaactgtaatatctttcaaaagaataaaaatattcttactaccatttgtatgatatatttcaaataaaattttatttttttcaaaaaaattatttaattcaaaaattttatacttatcaccattctgtataataatttgaatttgtactgagaatgtatcttgattatctgcatcagtatttaatactttttgtgaggttaaatacattttatatatatctctaacataaattgatttggcaaaatttatttgaagaaacatatccatagaagtttctatctctttgatgctttgaccatagcaagaaacaatcaaatcataattatcaagagtctcataacacataatttgtggattatcatttataatttgaaatttattatctatgtttgtacataatgtaataaagaatatagcacaaaaattgttattttctgctttttcccaaaaatatttatcatctacttttgcaaatagaaaaaaagtttgttgaaacgagccatcataattcaaactatctttataaatatttttaatttcagacttttcttcattctcactaattatttccgtttttaaaatatcactatgtccatagacaatccattcattgtctgataatgtatgaatttcaccacccacaatagtttgaatttctaattttcgaataaacatttatttaacctcctttaaatactcaatatacccctccaataaatcttttctaaaataatgagcaataaataaaaattgtcgatcaaaatttgaatattgataatcaaaatcaaaataatctatagttttttttgacaacttatatatttgtaataaatatgtattatccaacttatttgtaatcattgattgcccaaatgcatttttaaacaaaatattttctgcaggtactcttttttcataaatacagctataaaacaaaacagtatatattgaatttgcaatgatattactattttcataattaaacatagaaaaaccattttttataatttttacataagattctttttttgtattatctactgaaggaattttaaaaatcattatatataagcaaagtaatattatatcattgtaaattttctcattatttcttgttaaaactttaatgaaagcgtttacaaaatattcaaaatttttatctgcatctatattggaaacaaaaaaagcattgatacatttttgtaattgcttgataaacaattttatattttcatcatttagtcttttataaaactcttctagtagttctactgagaatcttaaaacctcataattctccatatattttttttgattaaaagtatccaatgaatgaactataaaattttctaataaacactcactattttgataaaacaaaatagttctatctttcatcatcgtttgataattactatttctaactttgtataaatattcttcatattttttatgattttttatatattttatatatcctttttttataccctcttttatctctaatgtataatctgtaaaaagtagtatctgcaaagagtacaaacctaaactcacacaaatatataagagtgttatatgcaactttagtaatgtagcaaaacatattgaaaaaattataaatataatttttctatacttgctataaaagcttgcataacactttggagaaatgccatatatttttattgattgattattcgatacccgtttgaagattattgtaacaattgtactcaccatagaacatgatgctaatgcatatatcctaaaactagtaatctcacgaattatacttacaacattttgaaatgatttattttccaaatatgaattttctaatgaaaaaaatttgagtattaactcatctaatcctttagcatcagtgatatttatttgccaatcataataaattaatacaattaaaataataaaaaaaacaataaatattatatgatttttaatgcatcttatagaatctaaaatcaatcttttaactttattttgaatattttcaaaaattttttttaaattatcgactagtttttttagcatcttcatcactctttttcattttatgtttcttcataaatgaagtttttcttattacctccttaggtaaatctttatttgtataattaattttaattgcattaataaatgcattttcatcataactcttatgactatccatattctcacccctatataatatatcatctataaaatagattttagtatttcattagattattctatgataagtatttttcagatatttatttccactataacctttatccataaaaattcactttcatatattattatatgaaagaattacaaaaaaatctatacttatagcctttaatttataattattctgctcaaaaaccccaatttctatacatgtctaatgataaactatttatttattcattgcaatcaattaaatacattttatatataaaatgtaaaataatcataatgaaagtcgtttaaacatattatttatacaactttcaacttataataacatcattttatcaactacttctgtatacgattgaataatcttcacaacctaaaaacatcctcatctgtttagtttggtacagatagttcattgtcttctttgctgtccatgtcaatgactgttgtcaccgcatgcagtaatgacttctcatctattcctgccaggataaagcatgccttgtcaagcgcctttggtctctctgtgcttgtttggatgcatactgctggaaatggctttcctatcgatgtaaagaatgaagattcctctggtaatgttccactatcactcactactgcaaatgcattcatctgcagattgttgtagtcatggaatcccaatggttcatgcatcacgactctttcatcaagcttgagtcctgctgactccactctcttcctgcttcttggatgacaggaatacaatattggtatgtcatactttttctgccagcttattgatggctgtaaacagtgacaggaaatttttatcggtatcgatgttctctagtgacgttaccaagtttctgccaacgaatccctttgcgccagtaatcaatactttcattatatttattttcctttcaactatatattaactaatacgaacaatttgaatatctttttgacctcttactccagaagttgccgttagtaaattatcaacagatacttcttccttattgagccattttacaatagcttttggaagattaacacccgctaaatggctaaatggatatcctcctccaaatcttgcattcatttccagtatatagacatctccattttcatctatgaatgcatcacagtccaaattagcaatatgctttaataatttagacaacctttcacctattaattttacctcagggaaatcaacagtttgtgcacaatcagtttcacctgatctcattgctattttctttttaactatagtattttgataattgccatctaaatcattaataatatccattccatattcttgaccagttatcatttcctgaataagaattgattgtttaatatcagcagatgattcatatttaagatatgtattaaatatttctctacttaattttttataaaacacttctaattcttcgttattgtcagctttataaataccaatcgatcccataccccatcttggttttaaaatcacaggatattttaaatacttttttgcttcttctacatctaaataagtctttggtgtattaaaaccattttcttttaagaacttatatgttgaatacttatcattacatatattaagtacattttcatcagatacaactacattaataccattatcttcaaataacttcttattttttgacaaaataggtaaatcaatgtcgaataaagatataattgcattaattttatttttattacagtattctagtaaaaaagaaatatacttgtcatcatatattaatggtgagactacacattcatcagcagctaaaaaagctggagaatttacatcgctatttgcaacgaaaatttttccttctccatttaatgattctttaaaataattaactaaatatgttcttcgtccaacagatgtaaataatatattcatttatttatcctccttatatgacattcgcatatatatttttttaccaccacacatataatatgcaggttcataaccaggaaaatcaaaagctcttactttataaaagacattacctgactcaaaatcagatttaacaatttctttatatttcaatatactctttttattaaagtatctatgttcatatcccctagcttttagttcctgcattgtgatacttttaatatcattatttagaactaacggtattatttcaatcatattttcatataatgtaatttgtgttttttgaaatacagtatacccagtatcagtatcggtgatttcaaattcacaccttcttataacgtttccagtatcaataccttcatcaacataatgtaaagtacctcctccaattttagatcgaaataaaattgaataattacaactatatagaccagcaaattctggtaataatccaccatgcatattgataattcctttagaaaacagattaatcacgttaatttttatgatatcaccaaatctacacgataaccctaaatcaagttctcctggtttaaatttttcaactaagtcgtcaaaagtatatctttgtatgttatttactgtaacataattatacaaacaaggtgttgattcccaaggatcattattatttggattctcatcattgataacaactcccattaattcaagtgattcgttagaaataatatattcaacaattttagttgctatcggtaaacttccaaacacaattattttattttttttcaattccatcacctatcctttgcgcatatttaatataatctcacaaatcatatcaacatcttccaatgacaaatcagcatataatggcaaggttaaaactcttttacttaaatgcaatgctactggtgtttcattaacatcatattttccatggaaacattcaaatgtatttgttaaaggataaaaatactttcttgctcgaataccattttttgtcaattcctcaaacacttcattcctagttgcaccaaataacttttcgtcaaagaacactggaaaatatgcataatttggtgtaacatccttttgaacaggattaaattgtaacccattaacatttttaagatgatacatatatctttctaccactttttttcttttagctatttcttcatcaacatgtcttaaattacataatcccattgctgcacaaaattcattcatttttgcatttgcccctacaccatctacaacttcgggacccttaattccaaaatttttaagtttatataattctttaccaaaatcagcatcatgaaaacatgcacatccaccttcaatagtgttaaatacttttgtggcatgaaaactaaaacatgatacatctccataacttccgattcctttgcccctatattgaactccaaaagtatgtgctgcatcataaataacttttaaatcatacttctttgctattctttctatttcttcaatattacatacatttccataaacatgtacaggcatgattgcacaagttttatcagtaatcaatgattcaattttattagtatcaatagtaaatgttactggatcaacatcacaaaacactggttctaatccattacgaacaattgcatgtgttgttgaagcaaaagtaaaaggagtagtaataacttctcccttcaaattcaatgcttgtaaagataattccaaggccatatgcccattggtaaacatatccatatattctaaatccagataatctttcaattgtttttctaattctttatgttttggacccatattggttaaccaatgtgtttcccacatttctttaatctcttcaatatattcatcaaaatcaggcattgatgaacgtgtaactaagatgttatttgacatttttaaatccttctctctaatttttttgaaataaaaacaatgtgtttagcacacattgaacatttatttttttcttctcatcatgttaagtaattcaaaaaacatatctattctgaaaattcttgaaccaataacatatatcattgcaccagataatacttgaagaataattattgctatattcactattggtaagtattgaattggccaaataataagacccatagctaaagataaaccgatatagggtacaagatcctcaatttgttctttaaaagaataatctaataatctcttatttggaaaagcattaataactgcactaattgggccagtaattaaatacgctattgccattatgtgtacaccaaatggcatagcaattaaaattgatattacaccaatggatttcttaattatttctaactttaaaaattcatcacttcttcccatagcttttatggcatttaaattagctgtatgaataggccatagaacgtaagtaaagcaaaatattcttaaaaagaatactgagtctaaccatctttcagtcaataatacaattactaatggcttagcacagacactcaatcccaccattaatggccacattatatagctactcattttaatcgactttcttgtcatgcttttaacaacaatcgtatcatcttgagccgcagccattactggtaataaaacactgtctattgatgtgttaatattagttacaatcaagctaggaaactgttgtcctttattgtaataagctaaatccgcaggtgaatatattttaccaataattaaattacgtaagttattgtatcctacatcaaataaagatgaaactaataatttccatccataagagaataatctctttaaacgttcaaaagaaaaaattaatttaggtcgccaagtaactgtcaaccataaaataagagtatctatagttgcatttgataattgttgagcaaccaaagcccaacaaccaaagcccatataagccatcgtaatacctataatagccgaaaataaagtaccaccaagcgttgaataaaaaaatcttttaaataataagtgtttggagacatatgcctgctgaattcctttaacacctgatattatcagcgtcaaactaataacccgtgttaatgaaacaagagaactatcttcataaaaatcacctataaaaggagcaattacaaacattaatgaataaagaataatacatataataaaattaaaataaaacactgatgaaaaatctaaatcatcactgtcttttttttgtattaatgcattgcccataccactatctacaaaaacttgcaaaatagaagtgaaaaccataattaatgtaattgatccatactccttaggtgatataagccttgcaagtacaatagaaacaataaaacttactatttgtgctgcacttctctcagcaaatctccaaatcatattagatactgttttactttttatatccatttttcgtaataatactcttatttacttgtatatttattttcttaaaaaacttttttatataatactttatttttacaacaacatttactcttttgttaattctatctattttagaaaaatcataatttctaattaaatcataatctttattattaatttcaaaaataaaatttggattaaattctttcattgagtttaatttttcataatcctttatgcatatatctttatatttaacataatccattgcatacacctcttcaatatagctaaaaatatccatacctggagtatcattaatcagttgtgatttttcattatgaaaatatccatagcattcacaattataagaataatgtctaacaggtatagaaagaacactattagaaatgcctgtcgtaatagagcctgcaactccaatattaatatccatatcttttaaatactcttctaaataagcgggagataactcaccaactaggcttattttatttttaatctctgtagacaatttttcaattcttttttttaataaatattctccgggtccacttccaacaatttttagtcttgcatctttatatttcaaagagaatttttcaaaaacatcaatcagacctaatacatatcctttatgcggaaattcaaaacgagaaatactaataatattaaaatttttcctgttattaaatctttctttaacgattatttcattaaaatcattaattctcattacagattttaacaaaaattgttctggatttataaaattaattttatatacattttgtaacgtttcataatgacgtttattacaaaacagtaattgattcgtttgataccaataataatacatttctctcattgtatcatatgtatttcttttaaatataggattaacaaaatggttttctaaaaacaattcattatttgtaaaatgtggcatgattaaaaaagtatttatcatacaaccaattgaattttttttattaattgtaaataattaaaatctataggttcaaaagctatcattactatttgatcatttttattatattttaaaatatcattaatttttgtactttttgataaaatttctgttgatacaaaattgatattgtctttgttaaaaatatcagaaaatgaattagatatactagttttttggggatgtatccatgtaatatctagataatgctcaattaataaatttttacataaattataaagaatattttgaattcctcccatttctaagtctctatacataaaaactaaatgtttcatttttaacctcctaagacaaaatcataaaaaacaaatatgaaactttgtgttttaaatcaatttctttagaaactaaatattttttgtaatatacaaacatttctttttttattttttttcgttgtttatagtatcttttcgaatcagtcttaaaaatattaacaatcaatgatagcaattgatttgcatattgggtttcttgtagtaaaattaaatcatcagaaaaattacttgctcttaaaagatctatgatgtgcatatatgaatctaaaacagtcattttattatccttaaacttacttcttgagatactaattgtatcttgtcggtaatgatacaaaggaattgtatcataaactactctattacactttaaaatatattcacaactaaaaggagaatcttctccttttaaaattttttcatcatatttttgattacctataattgcacttttatacattttattccacgaaaatccataaaacttatttggcaaaatcatatatcttagtgattcttcttttgtaagaatttctacatttttaaattgatcatgcagccgagtcttattgccctcctcaatataaaagctacacacagacatatctgcatcataaatcaacatatttgttaacattttttctaccatattatgttctatccaatcatcagaatcaacacacactatatattcgccattgcaatattctaatcctttatttcttgcagatgctaatccaccgttctctttattaattaaaataaaacgactatctaatttagtatattctgtacaaatctgttgagagttatctactgatccatcattaatcattattacttctaaatgtaaatgtgtttgattacgtatactatctagacacttgcgtaaataattttcaacattataaattggtactataatagaaaccaaaattttatcaatatttttcttcatttataaaacctcccatatttaatcttaaaaaaatcaaattatatataattattataatctctgtaacatgccttgcaaaaagatatgaatttttaaaagataaaaccagacatattacaataattaaaaacaataaagagcaatattctttctttctatttttaatgcatcttacaatcaatacaatataaaataataaagacattgataatccaattattccaattttataaatatattgtgtataacctgggtcttgataagcaattttaaacgatccaaatattaactcattaaaagtaagtcttgaaaaattaaaatgcaagttactcgcatttacaaaagaggatgttgcataataatttacaaatttacttgatatagaagaaaaataagaattcttcatagatatttctacgatgatattgttgacattattagttgttaataaaaacaaagcaagtacaggtattatggagacacataaaaacaaaataaaaaaagttacaatagatttattctttattttttttgtcaacacaaaatataatataacaatttctaataataccatacttattctagaagtcagtagagatgcaacaataaaaataacaatcttaataaaacttggatttttcctaatacattcacacataagtcctataatactcaatgtacctgcaaaatcatatccattagttaatcccgatcccctaaaatagtttggatatctatcaaagccacttataaatcttaaaatattttgtaaatccacataaatagttgattcaataataattattactgagtgaattaaaataataaatattaaacaattaataatagtttcattatctaatttggaacttgatatgacactagatatagctaatatagtaacagatacttttataaattttcctagaaaagcaaaatcaattgtaccagtttttataaacaaaaaaatacaatataatataacacacacattaattaacagtaaaataatattttttttatgtatttttaactttccttcatacaaataatatactaataccacactattaactactaaactcaaatctatcaaactactaaattttgggccgaaaattattaagaaaaagtatatagatattttaattgtatctaaactatttctaaaaatcttcaatttcattaattaactccttccatacttttacatgcgagttaaaagaaaaattttcatcccaatgtttttttgcattttttgaataatcttcccagtcatctccacataatttgtttaaaccatgaaaccacgaatcatcgtaattatctgctaatttaccaaaatcttcagtaattatttctttattaattcctatatctgttgctatcactggtattccagcagacatatattgaattattttaaatccacctttccctagagaatattttttattcattaaaggcattatacctatgtgcgcattttgtaattcttgtaaagcagttttgcgcgtccaaactatattttttattacaaaattagtaggcacataactcactgacttattacaaacacatgtcaatttaacacttctattgcaacttaagcgcatttgttttgaaaattcttccaatttaggcataattaccattaagttagcaatattactcgctgtagcaatccaaatgatttttatctcactttctagattcttttttcttatatttattaaatcctcagtataatgaaagtctccgtcagtagtagttaactttatcactttatatctatatggtgaatccaaaatcatttttaaataatcacttaatacaactatttttttagagtacttttgcaataaatcccattctttttttgatatttctttattctctaatatatcatcatcaaaatcccatattgtttttgttttcataattaattttttttctaatattttttgaacaaagaattgtcttctaggacaaatttctctatttattattacaatatctggtttttcaataaagttgtccaaaaataaaaaaaacacacttctaaaaaaaattgataatgtgtaaataatcttatcaataaagtaagatctaaaatgatattttgaataaatattatcactaacaatatttctaaatattaaaatattatcctcattcaaatatttagcatattgatagattctataataacctgaaggattaattcttgcatttctcacatatacacaaattttccccttttgtttcatgttttctcctcctctaaaaaattgacagcaattcgtaattttttgattgaatatatcaacaaaattttaaccgccttttcttgcattccttcaacattttttccaaaaactatggattttttcagttttggtcgatgcttctcgttgctttaatttaagcaagcaaacttgtaaatgtatatttatatcaacttacttatctgattaccattattatatcaatcatcttatttctaactacaacgaatataaaactctctttagttgtcggctcaacaataatttattttaaaatgttttattaattactgctatatagtatattaaatactcttttccaaacctaagaaaaaatcctaatttacataatattgcatatagtcttactaacaactttttccttatcaaatatttcttccatacgttttctaccggctaaccccatagcttttttttcctcatatgaaagattaacaaatttcttcataactctatacaaatcatcaggattctttctatcacataaatatccactaactccatcttcaactgcttctaaacatccatgaatattagttgtaataattggtcttcctgatgctgcacattcgagattagtgtttgccattccttcatgccatgaaggtaatacaaggcaatgacattttttaataaaaggctttacattattttgatatccccaatattttagccatccttcagcttcatactgagtaatcttctctttataattatcttcatattcaccaagaatatccaattgacaggtcacaccatcagcaataagtcgtttcattgcaatcagtaactcatcaattcctttttctgccattacacgtcccatgaaaagaaactttattttatctccttgtggatactcagatacttgatattgagttaaatttacacctgcaccattaagacaacatgttaaactatcttttacaataccttcatctatgaatagttgtctatttccttcattttcaaaaaatacaacctttacatttttacaagcaatcttatacataagttttattatttttctaagcattccttcattctgaaatgctgttccaagtccagtaatattgaccacataaggaattctaagtattctacacacaatcccaccatacacattaggtttgacggtataagttataaccatatctggcatttcatttcttaatatttttttatattctctatataatttaaaatcattaataggattgattcctcttctgtcaagaggtgtgtcgataatatcacatcccaactgcctaatattttcaatactgccattattaggtgttattgctattacttcgttttttttaattaactcttgaattaattctttacgaaaactatataagcccttgctcgaatttgttataataattattttcaccttatcatcctacctttttatcatcacttcattgtacttcatcatataaacattttcttcatatttcccaatagctcgttcattcaacaaattcttcatattactaatcatatatttaggaaagttgcatccacattcatatgcatgtggatatcctcctccaaatctgggattgacttccgaaatataaaattgtccattcttttcaaaaacatcaatatcaatctgtccaatgaatcccatacactcaacaaatttctttactagattagataatttttcattctttacagaaatagatttatctgtttctccagctcgcatcaataatttcttcttaataaaaatagatatcacctcttttgagataacatctacgtacacatcaataccatattcctgtccatccatatattcctgaatcatcagattttcatatttgctcatattaaattctaggtcatctatatcatgaatacactgtatattcatactgcaacttccattatatggtttcacaaatacaggaaatccaatctttccattattaaaatcaactttgaattcatctatatctatatagcttttcactgttggaatatctagtgagatacatttctgaaacattttatacttatcaaagcatgtttcaactacatcataagatgatacaaatggcataactcctatatctataaatttttgtctattttttgccaataaagataattctggatctataagcgaaaataaacctcttatcttttcttttttacaaatatcaaaaatcacatcaagatatttaggatcatcaattcttggcacaatataatacttatctgcaatataaagtgttggagccagaggattgcaatctgtcacaataacattacccaatccatttaactctcttttaaaatattctacaattttatttctagtaccactactaagaatgagtatgttcataaacgttcaactctccttcatttaaatcatcaaaaaacaatggtgttccacctgtatgtataaataaaatctttttattttcaattttattctttttaacgtattctttcatgccataaaatgctttgcctgtatatgtagaatccaaaggtatcccatattttaatagtgcttcttttatagtattattgatttctctacttcgtgctccatatttatttccggtatactcatcaataaacatagtttcttcgtctataatttttgatgaagtctttatttctatttcttttctatagctattaatactatccagaacaacatttcttcctttaggattctttctagcaatgcttattccaataatccttgttggatcgttataaataagctttcctataatcagcccagcctgtgttgtacctgtcccagaagcgaaaaaaatatagtcaaatacaattttattttctttttcatatctttttatctcttcatagcagtttacataagctttagttccaatatttccatgtcctccaccaggtataaaataaggattatatcctaacctccttaatttcagcatcttcttttcaattgaatcgtgcacctttaccactggaacaaaagtaatctctgctccgaataaattcatcattttactattaaaagtttcctttgaagcttcttctgggccaataatatagcaaggaagatttctaagtgcacacatatttgctatgactctacaatgattagagctactactcccatatgtaactacgcaatcatgattacttttttctatttcctcaaaaaatagaattgcttttctcgctttgttccccccaaaagaaaaaggtattaaatcatctctttttatataaaattcattttttccatcagaatcattaaacagtaaatataaaggtgtactttccaacttataggaatttgtgtttaatactattgaataataatatctgtcaacaagttttcctctattcagtattgctcctctttcaatgcctgattttataaaatgacaactctcaaaaagtttctgcgctaagacattgtccacttcagtatataaatagacttctcttagctttaaaacatctctagcatattcaagcaatattttagttgctttttttgcaatacctttacccttgtattcatgcactcctaaagtgatataatattctgctcttcctctatcaatagaaagtaatccaatcagtcctacttctataccatcatactctattactgcatcatatctatctgttctgtccttaattttttcaaaccaagaatatgtcttttcaatttccaaaggtaaatcatagtgtaagtatcgattgtttcttggatcatttatccatttaattttattaggaatatctgacttatcaaaccttctaattgtaacattacccatctatcttttccttacctcttctagcaatatctaatctgcctgctggaatctcttttccaaccaatatgtctgatttttttataacctttagtatagttttaaaaataatttcaatatcaaaaataaacgactgattttcaatatactgtaagtctctatcaaatcgttcttcccagcttgaggcatttcttccatttatttgtgcccatcctgttaatccaggacgcacatcatgtctatgtctttcttgttcctcataatatgaaagatattcaactaataaaggtcttggcccaactatcgccatgtctcccttgagtatattaaaaagttcaggcagctcatctaggctcgttgatctcaacagcttcccaaactttgtcagtcttatatcatctggcaataagtttccttcttcatctctttcatctgtcattgtcctaaacttatacaaagtaaatatcttctcatctttacctggtcgtttctgcttgaaaatgactggtgaacctagcttagttctcaccagtatagccacaacaatcagtactggactcagaatgatgattgctattaatgaaagaatgaaatcaagcatcctctttatatatcttctatacatcatttaaaacatcctctaataatttcaataataatatcctgttcttcttcactcatcttgttatcacttggtaagcatagtcctcgattgaagatatccattcctacatcgactgattctcctgcaatataggcatttgtctttgctcgcccatctccattctttgtaacaaatggattgtttctatagataggctgcatatgcattggcttccatattggtctgccttctgcattatatttcgctaatgtctctaatatctctgttggacaagtctttccagattcactgatatagagcacatcattctctcctcttactgttttacacatagcttcttcatcaatgatcatgcatgacagccagtagtttggttctgaatttatttcatcatagggattcattttgactggtagatccttgaatccttccctatatctttcatagatggctctcttcttggcaatatgctcttcaagatatggtatttgccctctgacaacacctgctatgacatttgacattctatagttatagcctacttcctcatgctgataccatggagcattctctcttgcctgagttgaccattttcttaccttgttggctgcttcttcatcatcagtcagcagcatacctccagatgaaccagtgatgatcttattcccattgaatgagatacagttataatcaccaaaggtaccagtttgcattcccttgtacgttgcccctaatgactcagctgcatcttctataataatagcattatgcttcttacatatagctttgatttcatcaatcttacctggtgttccatagagatgagcaacaacaacgactttgacttctggatataattcaaaggctttctccaaagcaactggatccatattccatgtatcatattcagtatcaataaatactggtataccaccttcatagataataggattgactgttgcagcaaaagtcatatcactacaaaaaaccatatcccctgacttgactcctgcaagtttgacagcaagatgcaaggaagccgtaccagcagataaggcaactgcatattgacaacctacctttttacagatgagatgttccacttcattgatattctcaccaactgtagacatccagtttgattcataggcttcagttacatacctgagttcatccccatgcatcgttggactggagagccatattttattttcaaatcgttttatcataaatgacccctttttcttaaactttcttatttttgatttctaatcccaaacatatatccgaatcgtcaaatgaaaacttgtatttaaaaaaagctaatcgcttatgacgatcaacttttctaatcatattttcacatcctattaacggtccttcttttacaactatatttccattttctatatcacctatagaattatctataattgtagaattaaacttatttaaaaataatagatcatactccttcaatttaactaactttaatttctgatgattatttaattcaaagatttctttacattttaccaacgacttcttaaataaatctaaatctttgatttctaaaaatataactcccttcaatatatcgaaattatataatttccattctccaccaaaattttttaattgctttctctgtaaaataaaagatctttccaatgataattgaaaaagatctgaattcaaaatatttaatatttcattttcattttcataattgactaataatacaaagccatttttcataactacctcctaaaagacagtataatcccagtgtaacttttttatataaagttacaccaatgtttccatatgatcattttaattccataacatgctctctgtcagtgattacttcatcaaaaatattgtcatgaagtctatcgcagaatatgttattcttagacatttttttgacttctgtaacattatagtgtaaatatttatattttgcaaccaattgtttttaatatttgacctatttaaagcaaaaaatatatatatttcatataaaataagctttttatctctaagaataacatattcttagacattttttatgaaaacaagaaattgtatgtatgatatttaaataaagataagcaataagacaactatacatacaattgaaactaaaatactcaatgaattggcagttgctgacatatccccttgatatcctatttttctagtaaatacagctgaaacagttgataaaggtgcacaatatgccataatcattatctctttagctagtaatggaataggaaggagtaatgttaataaagaaacaacaattgttccaactattcttaaaccaagaatcttaaaaacatttttagcttctaatggtgaaacttttatctctaacattaaaccaatcattaacattgctagaaagctattacctgctccaattgttgaagctatagttaagattggtgaaggaatctgaagtttaaaaattgccaaaataaaaattaagacataaacatcaaaaggaatcgatgaaaataattttttaaacaattccttaatatcaaaatgattttctccactagccacatgatcagctacagcataagtcattcctaaccccattaaggcattcccaatatcaaaagaacacaaataaacaactcccatcccaggaaagaaactttgaacgaagggtaaaacaaaatttcctatattatatccagatgtattgatcataaaagcacctttcattttcgcatcatcttttatactcgctatgtaaccaattatcatcatcacaacattagatataattccaatcgcaataagtataagaattgttgcatctaattctattccattagcacttgttaataaagcacaaggtaaagtaatattcataataatggtcgctacaacattagcatctgacttctttaaaacatctaccttttttaaaatatatccaatcacaataatcaatataaatgtcaatgattttatcaaaacatcaaacatatctatccccacactttcttttgatattatagcagttgcttaaaagaatgcaaaaaaaattcaaattatgaaaataaattcaaaacatgaaattcactttttataaatgcgtgcttaatgatataataaaaccatatggaggttagattatgacaaaagcaatattttttgatatagatggtactttggttagttttcaaacacatcaaattcctaattcaacttttgaagctttaaaaaagcttcaacaaaaaggtataaaattatttatagcaactgggagaggaaaagatggattagatgttttaaaagatttcccttttgatggttatattaccttaaatggacaatattgttatactcaagataaaatcatttatgaaaacacaattcaaaaagaagatttacaagctttacttgattatttagaaaaatatccttttccttgtggtttcactgaagaacatactaaatatttcaatatgcgtgatgaacgtgttgatgaaattcatcgtattactcataatgatgatcatcctgctggtgattgttctcaagtgattcatcataaggtttatcaatgtatgtgttttgtagatgaacaagaagaaaaagcattattaaaagttatgcctcattgtatttctgctagatggcatcctttgttttgtgatgtttctccggtaggtggaacaaaacaaaatggaatagatcaatttttaaaatattatgatattgatttatctgaaacaatggcatttggagatggtggtaatgatattccaatgttaaaacatgttgcaatatcaattgcaatggggaatgctaatgagaatgtgaaagaaattgctaattatgtgactgatgatgtagaacatgatggtattattaaggcattaaaacattttaatttattataaagtgtatgaagtcagataacaaaaccaaactaaattgataaatagtcgcttatgatacaaaaactatttatcaatttatgaggtgaaatttatgaaatcttatttaaaaagtttctcattatttcttatttgttttctgcttcttttttcattacaaaatgtttatgccatttgtccagttcaactgattgtcaaaaaagaatatcattttgaaagttccggtacctcaacaactgtaaccattcctgaaataaaaggtattgaagattcaacagttacaaaggaagttaatcaattaatacaagactctgttgatgattatttacaacaagtgaaggaatatgatcaatcttataatcaaattaatgattctcaagttaaaaaatggcttattgatatcaattatcaaacttattatgcagattgtaatttcatatctttttccattaatttaactcaaataaatgcatcttcctatcttcaaaaaaactttttaaacattgatttaaaaacaggaaaactgcttacagtagaagattttattggaaaagactatcaaaaaattattaaagatgaggtccaaagacaagctaaagatgatgaaaagaatcaacaattcatttatttcaatgatgcaattgaaaatctagaaatcacaaaacaacaacctttctatattaataaagataaacaagtcgttgttgtctttaatgaatttgatattgctcctggatatatgggaatgcctgaatttattattccttaataacatgtatcataagcctagaaaaacaaaaatgacaataaatatcactataatgatactcattgtcatttttctttcaaaaaaagcaacccaatcaatgagttgctttaatataattatgtatttaatttttattaacaaatattttatcaatttcttctttctttaaagtacagatttcatttgttcttattctagtatataatgataacaaaatcgcaagtgaaacagcatctttattttcagttaaatattgatgaaatacatccatttcttcttgagttaatatttatatattcttttatttttcatctacttttatatttttaatactgattgtttgaagataatatttatcttgagcgtagacaaatactgagcgtaaaacatatcgaattgtatatagagtactatgggatagtttatctttattttctttatcataaaagaattgatcaacatcgttacttgtaatatcttctatattccaatcataaaaataagaaaggtgtttacttaatactttttcatatttttcataaaacaaaagtttaagagatattttttacttatcaatttcttagaaatatcttcaaacttcttagataatattttcttattgcctttctagatttctgttttactcactaagtattgactatctaatgttaaatcatcaatcattccaatgactggattatcatcatcatattcaactgaatcatatttatatgcatataatctttgtaatgctttcacaacaatatgatattgtttttcttcattggttaattcttcatagttttcaaaatagatttgttcgattggaactaagtattcaaatttatagaatttgctattggatataaaatcttccaataattcatcactattaacaaaagaaaaaagatatccaaataactctggaccatcttttacaatttcatatatttcatttttttcaattgcatcactaaaagcaaaacctttaaaactataatcttgataattatatcctaatatttgtcttaaaaagatatttgaataatcatttgattcatttaaattaatttctttttcatttaaatacattcttatatattgatcatgtttgaatgtaaatccgtatctttttaagaatcttgataatgatgtgtcattacataacacattatccaaactataaccattatcatctttattatcatttaatcttctacttaaataataaaaacttacataatcaatatttatacataaatgttcttttacataatccataaagtaatcatattgatcatctaatataaaaatagaatggtccttttgaaactcataactagtttcaagcaaatcatctatttcttctttatttatatttaatacttcacatattgattgttcaataaatgattgtgaagtggtgttaatgtacatatatgcacctccaatcttcaaaaattatcatattttggtaatctcttctaaataaatatcttgtatatactttatcttcaacttcatctaagcaactatcatatctaataaaatgttatttcttacattaaattaaaaaatcaaccagtaattaatttaaatggttgattttagtttttatttgtatcacctgttagtaaccactcaaccctgcttttgatacttttgctattctaacatccttattttttgttaatttactctctctgctttctattctactattttactgactacgcctcacctattccagtgattttgttaagttgtaatatattgtaatatagttaatccatgttcatttcttacgcttttttattctggtgtaaactatttcatttctattgtctttctttttttattagcaggcttttctacttaactttttcaacgttaacagtaaactaaagcacatactgagaaaatatgtaatatcgaaagttaaatttgggagatcaatattcaaatcacagagcaagatatttactatatttaccaaaaatctttcttcctattattatgcatactgcactaactatcaaagtaattattccattcaacggaaaaacatcaacactcaaataaaacggaatatgcctaaaaaccatcatcactgcaagatgtgagaaatagattccaaaagatatgtcaccaatatacttcataatatttgtcgtcttatttttctgaacttcataattttcaataaatcgaaatgctagtattgcaaatacagttcccgtaaacaatgaactaagtttcaactgagtgccgcaattagaatctcccattgaccaataccaatagccctcaagcatttgaagaacaatagtaactattaatgcaagaaataatttctttgttgaagactttatttctagcattccatttcccattagatatcctaaatagaaatatataagccaactaaggcaagatacacttattattattgaaatatatggatttatctcatatccgttcattagcggaagcaatctcataattatgatttctaacggagaaattaaaaagtagaaatacttgtatcttgattttgacattttatcaattacaggaaccaatagtgttaactgacagtatacaaaaacataatacataacagcagcactactcgcagttattaatgacttgataaattggattggtaattgtcctggtattttaattgttctcatagcagtgtaaatcagtgtccaaagaacataaggaactataatcttcatgattctctttgtaggatgccaccaatcggcgttggatagcatgccactaagaaacaaaaataatccaacagaaaaattgataaaaggtctaatgaatacttgaggtaatcctccaggtgcattgtgaatcaatatcactgctataatagcaactcctcttaaaagttgtatattatagctcttgcttgcttgcttgcttgcttgcttgcttgcttgcttgcttgcttgcttgcttgcttgcttgcttgcttgcttgcttgcttgcttgcttgcttgctaaattatctccaattacattctgcttgtcaatcattatcgtcttcataaatacctctgcatcaaataaatcaactttgccttttttcctggtatatctcttaagggtgttctttcaccagttattctgtcacaataagcctcatacttcacattcattgatggaatccaaattggatgctccaaaaactcatttaaacactcctctaaacctttaaaggtatctttgtattcataatgtcctctaattgattcaattttagaattatcaaactcacgattatatagtcgatcatatttaatttgccatttattccacactttttgtaaattatatgaattatctacaatcttcacttttggtcttttcccagtcttcttttcgataacatcacaataaaaatataaaatttctctccatgtatgactttcttctgttgttatatggaatgcttccccgtatgctttttcattaccgattaaatctacaatcgcacccgctacatctggtccgtatgtaagagaagttttcttatctgcaatatctttaggaaatataatagtttttcctttaagagcacgtttcaaccaatcttctttttcataaacacccaattgaatacggtatgcgttatatgtaatatatggacgaataattgtccaatttgactttcctgctgatttcaagagattttcttctcttcctttagccattccatattcatctaaagctagatattcaggctcttcgcaaatatcaactaatctaggactgttttctcttattcgctccttggaatcagcatagcaacgagaagaactaaagaagaaatactgttttgttttattcaacaaaatttctaatctattttttagttcctctgttgtataaaccataaaatcgattataacatcatattccttagtcattagtgaattgaaaaatacactattttttgcatttccttgtaaataagtaatatttccatagttttccttttttgaccttgttgtcacatacaccttggcatcttctttttttgagagtagattaacaagtggaacacccattgctccagttccacctaatatcaatatttccataatcaatcctccttcaatacaaaaagcaccgttttattattgctatccaccaaatttttaataaatgattcttccactatattgctatgttccgaaaaaactctaaatcctagagattctgcatagttttctaatgtaagattcatctcatctatggcaacgataaacatcaaagaatcattcacatttatatttcctagagtattcatatcatgggtaaattcttcttccgaaattaaaccaatatatcttctatgtttttttgccaatgaagcacctaaaacattagctattgaaccttcataacaattggacattccaccttcaacaactttacaattatatgaaatttcttgcttatctatgccttgcccaagataaagatatacatcatcagtaaggactgttttcaaaactttttgaatttttatacaatctttttgaactaattgtttagtaggtaattgaacttcaaggtgcattggaagtggtttatctaaaaaatcaaatatttgattatcgtatgaaaccacaaaatggctacgaataacatctgctaactctactgaataatcaagttctgttccataagttactaaaataactggaagttttctataaaaagcctctgtcataccggaaaaagcacttctcgaagaattacttgctctcaaacatactacgactaactctttggtttgagcgctaattccagttgcagtatataccgccgacctagcatctagaatttcaatgcaattaataccatttagtattgaagaattaataaaatcagtttcttttacatcaggagtgtaaactatatgttttaatttattataatccatttttattttaccccctttaaaattcttcgtgcaattttccaagctatacttcttcttagcctacccttgatggaattatcttgcacaatagtattcataactcgtaaagcatcactttcgtctatatctgtggtaaaaacttcaagtaaaactggcttttctgttacatttagccattcatctctacagtctaaatattcttgtttatttgacgctgataaatatgtaatccctaaattttcacatagcgatttcacaacacaaatattcttttccccattatgtccttttgctgccataaattgatttgcttcttcaccaaaatatgctgctctatgattataatttttaaattctgttccaacaccattgttaattagcataatatgaacattagatgtaatagtattaaacaaagtattcatgtcgtagaaaaaagataaatctccaactaccatataatgctcaatatttggattaactaatgcagatcctaaaaaagatgacaaacatccatcaattccatatccacctgtatttgtgaagcaaagaatatcatcttgagtttcaaaataattccaaacccttagtgtattaagaatactaaaatgtaaaatcgaatgattaggaattaatgaagctgtttcttttgcaacccacatatttgaaaatggtaactctggaattccctttaataatttattaaattcattcgtacacttttcatatattgaattattattatcattcgtacaataatgtttgaagaaatcaatttcctccatttcaaaaacatatgttaaatttctatatggatcacgaacgacaccatcttcatttacacgccatgtttgagttcctttaaagctaaggtatgcaccatgaactgagcctatatatataattaaatcaaactgtcttgtacccaaatcaacctcttgactattaacaaaattagctaaaaaacgatatttaccatggtaattgctcacatgatcacatattacaactgcattattactggcgcaaaagttatctattacacttgtttcttcttgagtaaatgcttcatgtgcaccaacgaatattccgatttttccttttggtagttgcggaaaatcttgatctacaactctatgaatgaccctgtattttggtaactcatttataataaaaccattagaataagtcgtaaccaaatttatatggactggaccagcatttccatgtgttagttctaacaaagcatcgttaactgcagttatagtatactctttatcctcattattttgaacagtaggaagctgtatacttttttttatcatatctggaaattgtacacttctatctataacctgtgcgacatgattgcctactctaccgcaatgttggattgatgttactgctaatacaggcaaatgtctataaaaagcctctgtgagtcctggaatataatttctagaagcagttgctccagtgcacgataaaactaccggttctccactttcttcagctaatccacacgccatgtaagcagctgctctttcgtcaacagcagagtaaacatcaaaatacggatcaatttgcactgaacctacaaaagaaatatttgttgtcccaggagatgcaattatttttcttatattgtgttcttttaaaagtgaaactaacacaagtgcgttaatttcatctgtatacttatgattcataatttttttaacctcttatatttctcctaagagtggagaatccttttttctaaatttaatttattttttgtcatgttatctaataactgtaaactttctctaaactccggcatacgatggtaaactattaaataaatcaaatttggtacaatacaacatacaacagcattaacaatcaatgttatgattactgaaaaattaaagcagttgcaaataataacacaaactgagcaactaacgacagttataagagtatatcgtatcaatctaaataaataattacgaatttgagatttcttaaacaaaaccgtaaacaaattgtgtaataaccaaggcataccgacaaataacatcgaaagagctgttgataataaaacaccgtagattccacatacatgaaccaatccaagattcattccaagatttactattgctgttacaagtggtctaaatctatcttcgtgccatataccagctgcatccttgtaagtatttaataattgattaatttcaaatataaaaaagtaaacacaaaaacaaataacagcaggaaattcaagcattaattctctcccaacccatatttccataaaaggctgatatagacatagaaaacagcatatacaaaatcctgcaatccaagaaattataaatgtaaacttctttaaatcattaaaattcttttctgtactctcaacaattacactattacctattccagcagtacatgattggaaaacaatactaacaatacctataattgatgttagaatgaaataatagttttgatatactgctaagactgtcaatcctaaaaaggcagaaattacaactgtatcagctgaatttactactacaccaccaagttttgaagtaaataaatccttgattctttgattgatttcctttactttttcgtttgaaagcttaccttcaggtttaaactttggatacattttattagctataattgcagtaacgatattggtaagtgcttgtgtaaataacgccaccattacataagcataatagtcttttaaaagccaaagcactaataattgtaaaacatattgaattgtacttgttattaatgtaactttactaacaatatctactctctgatgtgcctgaagaatactgttcttatatgcaaacaaccaatatgacaaaacggtagctccaagatttaataaatatagaacatatatatttataccggctggcacttctccactaattaatttaggaataaatggagtaagaatacatccaacaacagctataattaaacctatcagtctatagtaatatttataaagtttcattagcgcacatatggttgtagtgtcatcttccgcaattggtttatacatgctgtaaaccatagcagaacccacgcccaactccgctagatttaacacctgaagtacagaagtaaataaactatttagtcctaagtattgaacccccatgagataaatcatggcagttcgcataatgaaaggtattaaaatttgatatatttttaaaagaacaccaaaaacaatatttcttgatgcattcttagttctttctatttttgccatataatcttccctttctatatataagattctttaatacatgaaaaattcaagatacctactattaccttatttaagattcttgtcaagaaaactcaaagattccattctctttttatcaataattttttttgcagtttcaaaagtacattcgcacgtaattgattctatatcatttacagttcttaccatacgattagtcatattcaccatatttaataaagtgtctattctcgatgacatatccccatacccttcttgaactggtcttaaaatagtgtagaatggacattcataaatcaaactaaacacagttccatgaaaagaatctgtaaataccatttcactatttgctatcaagctaataaactctgctggaccaattggtctatcatcacctttggaattctcctttaaatcaaatatttctaagtttttagatttagctattttttctatttctaagtcaatttcatgattatctattcctaaaatatacttaaaaacataaggtttatctggttgaaacttgcttttctttgatatttcattccatttatttttttctagtaataaagtaggatcaagaaccgtcattacatctgttcttcctgtaagatctttaactatcttcgttccagcttcttcacgcattgaaatagctttaaatccttttaatctttctttgtatacatctacatattcttctggaagatcacttaaaccaatactagctgcatatgcaattttttgatcatcatttgcaaatgacaaaaattctatatcatcattaaacttaaataatggattccaaatttgatcagaaccagctacaaaataattgtattttttagcaatatttttattatttgctatgtatctagtttcatattttatatttaagttaaattttgaaaaataatcagctttcgttttagaacgcaaaatttttatataatttttaatttttgaactgagttttatagaatagttatttttataaacagttttacataatccatatttatttaaaacttcttgtaaagcataattttgtaatcgattaccataatttaaactttgaattgtaattattgctatttttttcacacaaatccctctcacttagttatatataatattttaatgatataatacttgattttttctttaattttccaatcactattacatccatattgcttagaaaatttatcgaataattcaaataaaattttttcccattgcatagaattctctattttttttatttttaaaataaatatagatgaacaacataatcttaaaattttatatgcaagaatacttatattgtaactggaactagaaaattcaatgattctttgataagtcttattaagtgataaaatatatgttaattttttttcgttaaatttagcatgtgtaacgctctcaccattaacacaataattgtataaatttgctccaatatattttcccatattacatctagttatgtaatcaatacagaacagtaaatcctcaccgattgctaactccgtatcaaatgacattccgttttgaatgatatttaatttgaacattttattccataagtatcctgatatttcgggtttatctaaaactaaatttatcatttcatttttatctatttcaatttttaataaattagtatcaatagaaatattcgtaacaccccttgtatcaactacattatatgaacaaaaagtcaaatctattttttctcctttaaagggagcaactaattgctcaatagcattatactctaagtagtcatcgctatcgcaaaaaaacacatactctcctgatgcaattttaaggccataatttcgtgcactgcttacaccttggtttttttggtgaaaagaaagaatattattatatttcaaggagtaagtttgacacaaacaaaagctattatctattgaaccatcgtctatcaatattatttctatatttttatacgtttggtttataatactatctatacacctacttaaatttttctcagcattatacactggaacaattacagaaaccataccaccttccacgtttttcaccaccaatctctacaaaaatattactacttaatcatattcttattgtacagttttctttctatcaacataaatcataaccgacttaacccctatataaactttatatttaaaaggaactatcttagatttgtaaaccatatgtttattattttttatgattgataaccaattatctttattttcaaactctgttttttcccaaactgagtatgttgatattaagtaaattaataatttgctgtacgaaaaaatttctaaatctttttcgttgatttctttaaagtaaacacatttttcataaagtgacaagaagcgttgtttaatttctgtaatatttttatcttgaccagttatactatcatttcgttgtctataaaaatatagttcagatcttcctcgtacaatcaattttgatttatatataactttgtatgtcgttgcttcatcttcaaaatgtcggccaactggatattcgacattattaaataattctcttttatacaatttattccatgcaacgcaagatataaaatcacctaaatttgtttcggttatccattgttttgcattgagtattttcatttcactataatacttcggtttaggaacatttccatcaagaaatgaaacactataacattctgcaatatctgcattatttttggaaattaagttcattaaatactcaaaaaaactagaatccaaataatcatctgaatctacaaatccaatgtactcaccattagctatttgtataccagcgttgcgagcatcagaaagacccccattttttttatgaatcactttaattctattatctttttttgcataatcctcgcatatatagccacaattatctggcgaaccatcatcaactaaaataatttcgatattcttatatgtttgatttattaaactctttatacattgatctatatactgttcaactttgtaaacaggcactattacagatattaaactatcattcatattgatcacctaccttttttaacgattttccaaacacaaattttctttgagtaataaaatataatgccaagatagcaaaaaatggtccaactccaacaagttgatacgtcattaaactattaaacaaaatattaactaaatatataaaaaccattccataaaatctatttccactttgccatttgttataagctttcacaataataagcgaaataaatattgcacctatgattattcctatccatccaaaatcccttaagaaataataaataatcgatgtatttgcattaaaaagcacagttatattaccattaccaatatcatgaaatccttgacaatacatattaaattcataagatggcacttttgcagtagttaatccacaaaattttaataaaagtacaactggttcaataaaagctgcaaacgtcagatatccgtgcaagcgttgattcaatgcaaattgtggagcgttttctagtatataatctaaatatgataaacttcctgaaaaataaattactatattttttaaaagttcctgacctcttcttatagtaactaaaatcattattgctactaatatcattgttattttttttatcttctttttatacctagtgtcgatgaatgtttttgaaacatcaacatttcctgtaatccacataattataatagaatatagcaacaaaataatggcatatcttcctccgttaattatggtaacaagtatggtattaaataatgaataatacaaatatttacgttttttagtttcgaatgaaaaatacacaaaatatattatcaatgcgttcaataaagacatcggtataatacgaaataacatatccaaatacattgaagaaaaattattcccactaaaatacatttgacgtatcgtacttagactccctgaagataataaaattgatactacttttaataccattggtacaattaatattaatgaaaacagttgtattttaaatgcacgatgattattagataacgctagattcgtgtttctttcaatgtccatttttttattagtcataaacgttaatattatcgaatctacaataaaaacaaacaaccatgcataaacatgaacaataccattaggaattctcaaatcatatagtcctaaacttgagactgcaccaaaaacacaccagattcctgtaaaaatagatacaatattaataattttatgaaatttattgatagaaagcagtaattctatactaaataaaataatatatcctaagaagaacattcgtttgtttcatcctctcatctctaactttaaatctttgcatataaataaattggaaagaaaattcgcctttttaatacaaattgcataactattgcttttatcgattttctaaatctacaatgttgtattgcattcgaataaaattcatcatccagattacttttaatttcttttataatcacactataaggctcatctctattaaattgtgatactatcacattaaaaacatcatgtgctatttttcgatttaattgtttctcaaagtcactataattaatatcaactttatttttaatatgttctgcagttattttaggccaatcccaattatatactttcttactttttgttgcagattgaacattatatctataaaaatacaaacattcattcagtatatacattgaacttgaattatataagcaaggaattgtacaagccacatcttctccaattgttgctttttcgtttgtgaatacatttttaataaatatttctcttttaaatgcttttccccataagcttggctggaaataacttgcatcttctttctgaataagatacggaaaaatttctttcttcatatcttccttagaatagtatccgcctctaaatggtaatttaacgggtttcatttgttccccgttatcataaaaagttgcatggcagacaacatcaactccagtgtcttcaataactctagaaatactatctaaacaatcactagcaattaaatcatcaccatcaacaaatattaggtatctccctatagcacagtcagcaccatctttacgtgcatgcgaaactccctcattgcttttatgaataacctttatgcgattatcttgcttttgtaaagtatcgcatatttgagggcagttgtcaggagaaccatcatcaactagaatcacttcataatctgaaaaagtttgatttagcacactatctacacattttatgatataattttcgacattatatataggtataattacactaaataatggcgttttatccatcctaaatttctcctctctattgtattattttcaaacaattcattgtttcttcaacaacttttcttttatcaaaatttttttccatacgtttacgtccagctaatcccatagccttacgttcttcgtatgataactttatgaattccttcattaccttataaagatcatctgcatttttcttttcacaaaggaatcctgttacaccatcatctacagcttctaaacaaccatgtatattacatgtaataattggtcttcctgatgcagcactttccaaattggtatttgccataccttcatgccaagatggaaggacaaagcaatgacaatattcaataaaaggttttacatcattctgatagccataatattttagccatccctctttttcatacttatcaattatttctttatagttttcctcatatccaccaagtacatccaactcgcaattaacaccttcactcaccaacatcttcatggcagtgaacagttcatttatacccttttcggccataattcgtcctataaacaagaacttaactttatcaccttgtggataatttaatacttgatatttatccaaatttactccagcaccattcaatctatgagtttgttcttctttggcaatcttttctttgatgaaaatttgtctgttctcttcattttcaaaaaaaacaacctttgcttttttacatgctaccttatacatcgtagttacaattttttttaatattccatcattttgaaatgctgttccaagtcctgtaatgtttatagcataagggattccaagttttctacaggcataccctccgtaaacatttggcttgattgtatatgtaatgactaaatcaggcctctcagtctttaacagtcttctatacccaaagtagagtttcaaatccgtaattggattaattccacgtctatcaacagtagtgtcaataaactgacatcccatttctttaagttggtcaactagttcgccatacggaagagaaatgacaacctcatttattttgagtatgtcttcaattaattcttttctgaattggtataatccaacatcattatttgctaatatcagtatcttttttttcattatttaatcctctttgttggtacccctacataacttccactttccattatatttttaataactacacttcctgcaccaattaaacagttatcacatattgataaatactgttttatacaacttccaataccaagccaacaatattttccaatctttactcctcctgctatattagtaccgggacatatatgagcaaaatcatttatataacagtcatgatcaactgatgaactagtattaataatgcaacacttacctatatacgttccactgttaataactgcattagccattacaactgttccttcttttatttctacatcttctccaataatcgatctaggatgtattaatactggaattttcccttttatttttaaatatattttttctctgattttattgtcaccaattcctattgaaaaatcatattcatcaacatatttatcaatatcatcagttattccaataacttcatactttccattataagttttatttatatcgtcatctaaaaactttatttcttcatacccattaagtctcgcaatatctgcaataacctttccatgtccacttgctccgacgataattaattttttacacatttggagtacctctaaattcttccattgttacagatgtttcactagaaattccttctctaaataagacaacttttacagtcttcaagataatacttatatccatcttgaaattaagatgattaacataatagacatcaagatcaaatttttcttcccatgtaatgctgtttcttccattgacctgtgcatatcctgtaaatcccggtcttacatcatgtctatgtttttgaacatcattatataaaggtagatattgtacaagtaatggtctaggcccaacaattgacatatcacctttaagtatattaaaaagttcaggaagctcatcaagacttgtagatctcaataatttcccaaactttgttagtcttacatcatcaagtaataaatttccttcttcatctcttgcatcagtcattgttctgaacttataaagagtaaatatcttttcatccttacctggtcttttttgtttaaagataacaggacttccaagctttgttcttacaagtaccgctactataagcaatactggagataagatgacgattgcgattaatgataaagcaaaatctagaaatctcttaataaataatctatacattatttaaaacactccctaatgacttcaataataatatcctgttcttctttagtcatcttgttatcactaggtatacataaacctctactaaagatatcagcacctacatctattgcttgaccagcaatataagcattcgttcttgctcttccgttaccatctctagtaatgaatggattcattctatagataggttgcatatgcattggtttccagattggtcttccttctgcattgatagatgcaatagcatctaatatttcagcaggacaagtctttcctggttcactgatgtataaaacatcagtttctcctctgacttgcttacacattgcatcactatcaattaacatacatgatagccagtagttaggaaccgagttttcttcatcaaatggattcataataactggtaagtccttgaatgcttctttatatctttcatagattgctttcttttgtgcaatatgttcttcaagatatggaatttgtcccctcactacaccagcaatcacattagacattctgtagttatatcctatttcttcatgttgataccatggagcattttctctagcctgtgtagaccatttccttgcattatttgctgcttcttcatcatcagttaaaagcattccaccacttgaaccagtaatgattttatttccattgaatgaaataacattatagttaccaaatgttcctgtttcttttcctttatatgtagcacctaatgactcagcagcatcctcaataattatagctccatgcttatcacagatagccttgatttcatcaatcttacctggaacaccatacagatgtactagtacaactactttgacttctggatataattcaaatgctttttctaaagcaactggatccatgttccatgtatcatattcagtatcaataaatactggaataccaccttcatatacaattggattaacagtagctgtaaaggtcatatctgaacagaaaacatgatcaccactctttacaccagctagtttcatagccaaatgtaaagcagctgtacctgcagacaatgcaactgcatgtttgcatcctactttttctgatataagtctttcaacttcattgatattctcaccaactgtagacatccagtttgtttcatatgcttcagtgacatactttaattcatccccatgcattgtaggactggaaagccatattttattttcaaatttttttgtcatatgtttctcccttcttttgaacataaaaaaatacaggtcagtaacctgtaatatatgaaataagctattttagatacagtttcccctaccccaaattttcccatttcatactatgttccaaacttcaatagaggcggattccctgcgctctaaataagttcttgccttttaaatttcaattcccatacatattcttctattaaagaattctaggtctagataggcacattgattatgcttgtcaactttagtaatatgcttttctaacagttttaatggtccatcaataataatggttttaccatcttcttgatatccatgagaaagtcttatagtatagttttcatctaatacaagactaaaaaactcaatttctttttctgttagtgttgttgcatccacatttttaagttgtttaattaaaccatcattttgatctttcatttttagtaataaatcattaaagtcagcttgacataaatgagtttttacaaaaacataattattaaacattggtttaattaatacttccttagttctacgttgacaaacttcatattttggagtaaatgctattaaattcttattcctatttaaattagtaataatcttatttgttttatagtttaatgtatatagtacataccaattcatgatttacttactatttctaatggaactaagaatttttcattgaaaaaaatgttttttaatgttgctgttctatgatgacgattaatctttgtgatattacccttataatttaataatggtccttcatcaataattaattgagaatttactatatttccaatagaatgtttaataacatccccatttgaataaaaatattccattaataattgttcttcagtgtttagagtaaaaatattattctttgaatgaaaaagttccttatatttttcaaaaagtaaatcttttcccatatcagtaacaataaacatatgatcagggtataaatcctttacaatataatcttttacccctcttacactataccatttctctattttaggaacaaaagctcttataccctcttgtttattaagaaatgtaacaagattgtcatctttatgtatttttctatcaacaacataccaaaacacattcaacccctcatgcctttctcttataacagaacttcgtgttctgtgagaactattatagcatatatgtcttagttttcaaggaaaaatgttaaataacgtctcggcagcatgattattgtcatatatagtattaaatgatatatgacattttatttattatattttaaataataaatataagaattaaagaatgatctttatgtgataaaactgttattaaagtggatataactgtacccagtttatcacagaacacgaagttttatgatacaaatcaacatatataaatataatagagccaaataaatgaagttgactctttttttattgaaaatcttataaaagtaattatcaaaaaagaatgtaacactatatcctcaacatataaagcaaataaaaaaagttatctataaagaatgtctattctcttacagataactttcattttaatattttattacaaacattgtctcttatactttcaatagaaaaatttaaaatattctttattacctcaaaataatacaaataataaaaaatcttggtttatttcaaatgatacaaagcaaaaaagctcgaatttcatcgagcttttaatattttatcatattctcaagtattgtagagtattttattctaccccaacaataaatgaataaacaggttgttttccatttacacattcaagttcagcttcataagtatcttcaacataagcttcaatttcttcaacttcttcatcactaacatcttcaccataaattaatgtaatgatttcagaatcgtcatcaactaaaccttttaaagtttcttttaaagcttcaaccttgcttggtacacatgctgtaatttctttttcacataatgccatatattgattagctttaatatcaacaccatcaatattagtatctttaatagcaaatgtcacttgtccagtctttacacttgcaattgcatcattcatttcatcaagattttcttctaaagaaacttctggattatacataatacatgcagataatccttgaggaattgtctttgttggaataacttgaacatctacttcatcttctaagataattgcagcttgttgtgctgtcataacgatattagagttatttggtaaaataatgacatgttttgcatgaacatcacgaattgcttgaacgatatcttcagcagaaggattcattgtttgtccaccacttacaacatagtcacaatgtaattctaagaacatatctttaatcccatcaccagcagcaacactaatgatagcaacttctttttcttcttgttttggaacaattggtgttgctttagcagcaggagtggcatttgcttctaagattgaattatgttgttcttgcatattttcaatctttaatttaataaattcaccatatctttgcgcagcatttaaggcattaccaggttttaatgtatgaacatgaaccttaacaatatcttcatcttgtacaacgacaatactgttacctggaagtctttctaattcatttcttaaactttcttctttaaaggctttgattttacctggatctaatctaaagataaattcagtacaatatccataaccttcttctccatcagattctacatctactaaagcttctttagtagaatcatttttaatttctactctttcaatttcttcaccagctaatgcagccatgaatccagtaaagactaaaagcaatcctgctccaccactatcaacaactccgacttcttttaaaactggtaaaagttcaggtgttctttctagtgattcttcagcctctttcacaaaatacgaaaatacatcttcaatttccataccctcttgagcatattgaacaacagcatcactggcttctctaataaccgttaagattgttccttcaacaggacgcataacagctttataagccaccttagcaccgtttttaaatgcttgggctaattctacagcattaacttcttttttcccttcaaacgccatagaaactcctctaaagatttgtgacaagataactccagagtttcctctcgctcccatcaataaacctttagataatttctttgcaacttcataaatatcagttgaatcaagtttttcaatttcacttgctccagcactaaatgttaatgacatatttgttccagtatccccatcaggcactgggaaaacatttaacgcatcgatttcaggatgattattgtgaagcactatcgcccctgtgacaaccatctctttaaacagcttaccatctatgttcttcatctttaacctccatcaattaatcaatcactcgaacgctttgtacaaaaacattcacggcttcaatatcaatatctaaagttgtttctaatacatatttcactttcttttgaacctcataaacaacttcagaaattttaactccatatccaacaataatatatacatttaaaataatgcctgtttcgccatcttcaacgacaattcctttagcataattgtctctccctaacaaatcataaaaaccatctttcataattttttgactagacatcccgacaacaccgtaacattcagtcgctgccccgcctgtaatacttgcaacaacatctaatgaaagattgatgtcacctaaatcagttgtttttttgatcatacctattcctccgatctttttacacttatatatagttatctatattatatcttatttttaaattattgacaaacatttcccacataatgcatacgcattataacccacttaaaatcacttgtaaatgaaaataacaaaaaaatgttgaaatattcatagttttcgtatatgattatctcgcatagataaaaaacatttcttttaacttggtaaaaaaagtgaaaaaaatgtttgcatttttttaatattaatgctattatactaaagtatgtgaatcacaagttgtaaaggatggtgaaaaaaatggctagaaaatgtgaagttagtggtaaaggaccaatgtctggaaatactcgttctcatgcattgaattcttcaagaagaaaatggaatgtaaacttacaaaaagctactattttagtcaatggtaaaccaaaaaaagtaaaaatttcagcgagagaattaagaagtcttagaaaaagcgcttaattataaagaatgcatcctttggatgctttttttattatacttttaaaaagtcgttactcaaaagcaacgactaataacatcttgaactgttcttgtccatatacagcatgaggatgtcctgctggcataacaattgtctctccaacatttaaagcataaggttcaccatcaatcgtaatacgccctactccatctaaacaataaaccatagcatcacctgatgaacaatgcgtactaatttcttcatccttatcaaaggcaaataatgttatactcaaagcatcattttgaataagtgttttactaacaacttgatttggtaaataagcaacttcatctttcaacgttaatacacaacttttatcaatatttttcataatttgtttcatatagctacctccataactctatgataccattaattcaataatatttacaaaaaaagataacatttctgttatcttttaaaaccttttttaaattgatcaaagattgattctttcttagcagattttctaagcttaccatataaatctttttcatcacgagacaactttgttggaatcttcacatcaatcttaacaaattgatcaccatagttatcactacgtaaatcttttacccctttaccctttaaacgtaaagttgttcctggttgtgttccttcaggaacttttaatgtcacatctccataaacagttggtacatctacttcacaacctaaagtcgcatcaactgctgaaattggaattgtaatatagatatttttaccatcacgttggaagtgttgatgtggtttcacatagatttctacatacaaatcaccattaggacctccgtttgctccacgatgtccttttccttgaacacgtaattgttgatgtgtattaataccagctggtatattcaattctaccgtaatatttttattaacatatccatttccatgacaatgtggacatttttctttcacaacttttcctgtaccatgacaatctggacaagttgtttgattcacaaaggtaccaaatggagaacgttgttgtgttctaattgttcctgttccaccacatttaggacatgtttgaacatcatttggtgtttttgcgccactaccatgacaatgtggacattgttcatcataattaattttaatttctgttttcttacctttaattgcatccatgaaatcaatttctaattgaacaaatcgatcttcaccacgcattggtccactttttctttgacgagatccacctccaccaaagaaagaaccaaagatatctcctaagtcaacatcttcaaagccaccgaatccaccgaatccgccagctcctccaccgaatccaccagtttgatcaaatgcagcgtgaccatatcgatcatatgcagcctttttattgtcatctgacaaaacgtcataagcttcttgaacttctttaaacttttcttcagcgtcaggatccttattgacatcagggtgatattttttagccatcttacgatatgcccgtttaatttcatcagcacttgcactcttagaaaccccaagcacttcataataatctcttttatcagccatattctcacctctcactcattagataaaaccaaggcaaagccttggctttattttaatttttttctgtaaagtctgcatcaacaacgtcatcatcatttgatgctgtaccagcatcacctgttggattagctccttgagattgttgatattgatatgctgccatttgttgagcaacttgttctaattcagtcatttttgcttcaagtgtagccatatcattttcatctaatgctttctttaattcatctcttaaagcagttgcttgtgatttttgattttcatcaatcttatcaccttgttcagctaatgctttatcaatttcattaatcatttgttcagctttatttcttgtttcaatatctttacgtttcttttcatcttctgctttattagcttcagcttctttaaccattctatcaatttcttcatcacttaaaccagttgagttttgaatagtgatagattgttctttttgagttttcatatctttagctttaacattaacgataccattaacatcaatgctgaatgtaacttcaatttgtggaactcctcttggagctggttcgataccatctaatttaaataaacctaattgtttattatctttagccattgatctttcaccttgtaatacgttgatatcaacagctggttggttatcagcagcagtagagaagatttgagattttgttgttggaattgttgtatttctttcgattaatacagtcataactccacccatagtttcaatacctaatgataatggtgtaacgtctaataatacgatatctttaacatcaccagcgataactccaccttggatagaagctcccatagcaacaacttcatcagggtttactgatttattaggttcttttcctaataatctcttaactgattcttgaacagcaggaatacgagtagaaccaccaactaataaaacttgatcaatttcactagcgctcatactagcatcacttaatgcttgtcttactggtccttcagtacgcattactaaatcttttgttaattcatcaaatttagctcttgttaatgttaattctaagtgtaatggaccagctggaccagcagagataaatggtaatgaaatttgagtttgcatcataccagataaatctttcttagctttttctgcagcttcttttacacgttgcatagccattttatcagtacttaaatcaacaccttgatcttttttgaattcagcaacaatccagttcataacagcttcgtcgaagtcatccccacctaaatggttatctccagcagttgctaaaacttcaaacataccatcagctaagtctaagatagatacgtcaaatgtacctccacctaagtcataaactaatactttttgttctttatctaatttatcaacaccaaatgctaaagctgctgctgttggttcgttgataatacgttcaacatctaaaccagcgattttaccagcatcttttgttgcttgacgttgtgcatcgttgaaatatgcaggaacagtaataactgcttttgttactgattcacctaaatatgcttctgcagttgcttttaagttttgtaaaatcattgcagagatttcttgaggtgtatagtctttaccattaacatgttctttataacttgtacccatatgtcttttaattgacataactgtatctttgttagtaacagcttgacgtttagcagcttcaccaacaacaatttcaccatttttaaatgatacaactgaagcagttgttcttaaaccttcaggattagcaataactttagcttctccattttccataacacttacgcatgagtttgtagtacctaagtcaataccaataatcttatttcccataaaattcatcctccttaaatttattcatttacttttactaaagatgcacgaataacgcgatctttcaatttgtatcctttttgaagttcttctacaacaatgttatgcccaaaattttcatcatttgcagtcataactgcttgatggaagtttggatcaaattctttaccttgtgcttcaatcacttcaacaccattcttttgtaaaatgttcatcaattgatcaaaaatcatttgataaccttttaagaatgttttgacttcttcacttggattttgaacatttaatgaacgttcaaaattatccacaaccggaagtaattcttcaataaatgattgcatcatgaatttcaatgaattctgatgttctttttccaatcttctttttaagttttccatgtcagcaaagaccttataatagtcagttttccatgtattcacttcctcttgtagtttagccatttgactttctaatgattcttcttttgaatccgttgtttccactgtttcttcttggttatctacagtttcttcaacaacttcttcttcctttttttcttctgccattttttcacctctattcatcatcttcatcttcttcacttagcaacacttcctctaagctttgcgaaatatactcaactaaagaaaccaccttttcataaggcatacgcgtcggcccaatgacagaaattgatcctttagattcattgcctgttttaaacgaagcggatataacagaaacatcatttaaatcttcaatcggtgaatcagagccaatacgaacactgacaccttcttctaatgcaattggttctaaacttttccaagattgcgaattttcaaatgctgttactaaccgtcttaacttattaacatcattatattcaggctgatataataagttttctttaccagagaagtaaacatgactgttggcaaatttcataaatgcctctaagaatgcattgaacaaaacttcatgttctttgattcttgcactcagtattggtttgacatctctttctaaacgaaatgcgacttgattaataggagttccatccaacaattcattcatcacatttacacaacttgttaaatcttctaaatacgcattgtttttaacattaaaattacgattttcaacatgtcctttatccgtaacaataattgctgtaacactatgttcagttaaaggaacaagtgtaatattctgcaatcgttcatagccagaatttggaccaagagcaaccgttgttaaatgagttaactcactcaacatttgacaactttctttaataatttcatttaaagaacgatgtcgatcacctaaaatcgttgccacctgatttttaacttcatcatcaacacttggttgcatcaaagtattaacatagaagcgatatccctcagtcgaaggaatacgtcctgaagatgtatgcgttttttctaagaaaccatgttcttctagaaaagacatctcatttcgtattgtggcacttgaataaggaagctgatactttgccattaatgttttagaaccaactggttcagctgtttctacaaattcttcaactatacatttgagaatcagtaattgtctagctgtcagcatattccaacctcctttagcactccttttacctttgtgctaattacattatactcatccttttagcactgtcaacccttttgtgctaaaaaatataaataaaattcttttctaagtcaaaatgaagctgtcatcacaataacaagcataatatataagcttttttatcctctatgatttcaccaacgcaaaaaagagatatgaaaatcatatctcgtcatctaaaaaatcaactaaaattgtatttaaataattcattcctaaagctgttgtccttaaataatgatttttgatttccaacatctttagagtcctatatttttcaattgtatgttgatactgctttaaaaaatcaatatcgaattgctgattgatttcatcaatgcaaataccatcaaccaatcttaagcccatcattatcttttcaaacaattcatctttccttgataaaagaacatcttcttttaaataatgatggttgatatattgtgttaaactattggtattttctaaacgatgatgattttttagcgaatgagctgatatccctataccatcataatcttgataatgccaatagactaaattatgcagcgaaggtttttgacgatagtaattgctgacctcataatgcacaaagcctatttctttaagcttctgattgatatgttcataccaatatgcatcagcttcatcatccaatggctgatagtcctgatttttaagaatagtgtgttcttctaaaatcaaagaatagatggataaatgtgatatctgaagatcatttattaatgcgatatcttcatcaatatcttgaattgtttgactaggcaatccataaatcaaatcaacattgatatcatctattccctttgcatgcaacatttttatacattctatcgcttgttgagatgtgtgatatcgaccaattttttctaataatgaattatgaaatgtttgaaccccgatactcactcgattaatcccatattttatcaataaatctatcttatcttcattgatcgattcaggattcatttcaatgctgtattcttttacctgattagataaaggctcaagcattttgaataatgtatctaattgtttaagcgataaactacttggtgtccctccaccaatataaatcgtatcataatcaccataaatagatttatcttttatctcatatgataacgcttctaagtattgattagcccaatcttccttataaaaaactttacaaaaatcacaatagctacaaatatgatcacaaaaaggaatatgaacatataaagacttcattataaaccaaattcctttgctaaaccaccaagtgaggtttctttataagcacttgacaagtcttttccagtctctttcataacccgtacaatagcatcaaaagagactttatttttacgtaaataaccaagttgtttagccagcatcgctgcatccaaagcacgcaatgacccatagccatttctttcaatacatggaatttgaacatatccacctacaggatcacaagtcaatccaagattgtgttctaagcccatttccgcagcatattcaattaatgaattatttaattcataaatccatgccatagttgcagctgccattgcacacgctgttcctacttcagcttgacaacctccatcagccccagaaattgttgcatttttcttcacaacattaccaaataacccaccaatcgcaagagcctttatcaaatctttcttttcaatatgtaactgtttatgacaataatataaaatagctggcataattccacttgctccacatgttggagcagttacgatttgaccaccatcagcattttcttctgccacagcataagcataactagaaataaataatctttcacgatcagcttctcgacgcgtattttgagcttgctgatacattgatttagcaactctttttaacttcaatttcccatgaataataccttctttttttagcccattttcaacactaaaaaacattgcttctaaaatattagaaagataatgatcaaaatcttcaccttcacactctaaaacatagtcatataaagagattcctttttcatcaacatattttaaaatctcatccatcgtattttgtggatagacttcaaccggtgtttcttccatatcacctttaaaaagaatcgatccacccccaattgaataaacttcaattgcctttatttcctgatctaattcatcaaaaacatgaacaatcattccattaggatgaaatggtaaagcatcacttttaaatgaaaaagtcactggtataggggcaaatgttttttcaataatataatcagttaaatggcctttccccgtcaaagctaaagagccatgtaaatcaacatgaaaacgatgagctttaggatacatttccataacttttttagcaatcctttgaggtcccatcgtatgtgacgaagaaggtccaaccccaaccttaaataattctctcaatgattccatcaataatttcctcccattcgcattaaaaataattctaaacctctaaatcgatctattttaccagtcttaatcgcaacatctagctcagacaattcgtctaattttttcaacagctcaccaatatcaaaatccttaccatcctgtcttatatattttaaacgataaggatttaaagataaaatagaaccaatttcgcgatcattataacctttacgatccaataattttacctgataaagcaaacgcattgaacttgcaattaaaacaattaatttaattggttcttcattgttcatcataagatccttataaatttgaatacttttagcagtttctttattcaaaatagctttagttaattcaaaaacattttcttctacttgttttacaaccatcaagtcaactgtctttttatcaatatgatgactatataaacatatcttattcacttcctgagaaatctctaataaatcattaggcatccttgataaaaacaattccaaagcatcctcatctatttcacaacctcgactttttattgccttatgagttgctttatagagttgatgataatccattttttctacatcaataaactgggtatgttttcttaattgtttaacaacttttttacgctcatcaaaattcttttgatcatgataaataacgaataccgttgtaggattatcttgtgcaagataatctaaaaacatttttatatcctcatcactcatatctttttgtttttgagttgttaaaaaagttggattttttaatacaatcatcttatattcagttaaaaatggtggtgttaaagcatcttcaataatggctgacattgaggtctcattacaccaatatgtcatcatattcatatcttcttctaaaattgcatatttctttttcaaagatgctaacttttgttccattaaaagcttttcctcaccataaatgacataattcatcgtaccacctcactttcttcattatacatgaatcatctaaaaatgtaacgagattttccataaaatcgaatatgaaacatcccatcttcatccgtccttaatatttcaatattcttacgtttcaatctttcaataacacttatagaaggatgatgatacatattattctttttgactccaatcattgcaatatctggatgaatagcttgcaataataaaggcgatgttgcactttgactgccatgatgagagacttttaaaatatctacatcatattttatcaattgagcatacaaatccttttcaacatgaattgatgcatctccagtaaacagtatcttttgatagggtaatgaaacatacatcactaatgattgatcattttcatccatatattcattagatgatttaagcatttctactttcatatcaccaatagttcttgttttttcatacttatcaatcacttgaccaatcgagaaattttcttttaatgaatccaatgctccacaatgatcaaaatcactatgagaaatatagacataatccaacttttgaattccaatagatttaagataaggaataattgttcctcttgccagatcataatccttttgacctcctgtatctattaaaacattaccttgattcattggtaaacgaatcaaggtacaatctccttgcccaacatcaatcattgttatttcagtatatattttatactgactatatagagaaaaagacaaaaacaaggcaatcatgatagaaacttgtttttgaatagatttattaagttctaaatgacaaatcatctgaaaatacaaaatataaaaaacaattataaagaataaagatggtttagaaaaaacaagaaatatatttaaccaatctaaaaaatgtaaaagactttttaacaaataaatactcattgaaagaaaagattgtaaaaaaggaaataacatagaaaagcaacataaacaataaaaaaattcaataaatggcgttaaaaaataacccataaaataagttataagtggaatttgagcatttaatgataatacaagaggaacactagaaagataaataaaccatgaagaatatttaagatgtcttgttaataagacaataaaataaataaaataagaaaaaacaaatgaaatattataaatgatataaggattataaaataaggaaaggataactaataaagataagatatctaattcattaaaatacttctttaataaatcatataacaccaaaacaaaaaaagcccgatacaaagaaatttgcatcggaatggaaaagatataaatagctagacttaaataactaatccctttaacgattctttcttcaaaaaaatatcctaaaaatccttttaaaatactatacaaaagatgaatatgcataccagataaagcaaacaaatgaaccaatgacaattgactcaactgttgataatcatctgtgattccctcacttttttcaccaaacataaaaagtctttgataatcattaatcgtttcatcattagccattcgcttttgtaaataagtatatattccttcatgatgactatactgtaataatttctttaaccgtgctttataaaaaactttttgaccatacaaataatttcgttcattaaaagcataatcattactattttcattgatttgtaatggttcaatagaagccgttatttcatcttgaaagtgtaaatcattttcatgatataatttcacatttccaatatcagtttgaacataacagtacttttcacttgtttttatcacaatgccagtaatttgtgttggcaattgatgaatggttatacttctatgatacagcatcaataaaataataaataaaaaagcagcaattcgcttatcccaattctttatcaaccaaagtacatataaaaataaaaagatataaaaaagtggatgaaaatattgagctaaaacaagcaataaacaccccatcgcataataaaacaaatgatatcttataaacataaaaattctcgcaatcttaaatatgttttttctcctatcccactcactttcatgatatcttcaatttttaaaaatggttgtacttttcgataatcaataatcttttgcgctgttttctctcccactccctttaaactcattaacatttctttacttgcttgatttaaagaaatcgctttttcattttgagcaggtaaatataatcttgattcatcttctactaacatatctaatgacaaggcttttaaattagcctgcttactaactcctacttcttttaccaaatctgaaacatacttttcaccctcatattcatattttccatttttcaaaaactctccttctaaaatcacatatgaataaactttttcctgtttatctttaacactgggcatttgaaaatcataaacaatagaacatataataagaataatcaatcctataatttgatactttcttttcatttttctcaccttttcaacaaaaaaagagatgaatagctttcatccctatgcaatcatttatttttctttaacaatatgaaaatgctcataagcaagttctgtcgcaacacgacctctaggtgttctttttatcagccctgtttgcaataaataaggttcatatacatcttcaagagtcatcggttcttcaccaatacttgcagcaattgcttctaaaccaactggaccaccacgaaaacgatgaataatccctaataaatatttatgatcgacatcatccaagcctaactcatcaacttttaaacgttgtaaagcttcaattgttctttcttttgtaattgtttcatcaccattatattgagcaaaatctctcacacgtctaaataaacgattcgcaattcttggagttcctcttgaacgtttcgccaattctcttttggcttcttcatccatgaccatatgataaacctgactcgttcgatcaataatctttgttaattcttcttcattataatactctaactttgaaacaattccaaaacgatctcttagtggcgctgataaatccccagcacgcgttgttgcgccaacaagcgtaaatggtggtaaatctatacgaattgatctcgttgacgcttctttaccaatcacaacatccacacaaaaatcttccatcgcaggatataatatttcttcaaccaccttatttaaacgatgaatttcatcaataaataaaacatcacctggttctaaagaagtcaaaattgcgactaagtcaccagttttttcaatacttggtccagtcgttgtttttaaatgtgttcccatttcattggcaataatcattgacatagtcgtctttccaagtcctggagggccatataacaaaacatgatctaatgattcatcacgtaattttgccgcaccaacaaaaacctttaaattactttttaagtttgcttgtccaacatattcatcaaaggattgcggacgaagttgactttcatcatcttcaatatgttcttgagtatctaaaagatctctatccataaattcacctcctataatttaactaataaacttaaagcttttttcacataaccatttgtatctaattgttcatgtgataaagaattcattgctcgttcaacatcttgtcgtttataacccaaagcaattaaaacctcaatcgcttcatcatattcaactgaagttaaaaccatatcagttgcaacagcattgaacttcccttgtaaatccaaaacaatctgttgagcagcctttggaccaatcccaggaattttctttaaatatgtaatattcttagattcaatagcttgaataatcgcattcacatcacccgttgctaaaataccaatcgctgttttacaaccaattcctttcactaaaatcaattttaaaaacaattctttttcttccttggttaaaaatccataaagtaaaataccatcttctttgacttgttgataaacataaaccaaagtctcttttcccttagtaaattgatatggattagaaacataaagcaaataaccaattccttgattatcaataacaatatgatccctagccatatcaacaatcacacctctaatataactatacataatctaactcctattttcttaaaccttttctattatagcatagaaaagtacagaaattaaaaaatgagaaaaatttttctcattttttacataaataaacaaagaataataggtagaaacattgccggaatataattcatcaatttaatctttgtcacgcccaataaattaagacccgttgcaataatcacgagcgatccaacacatgtcatctcattaataaccgctgtcgttaatagaggggctgcaaacattgcaagaagtgtcaatccaccttgataaatcaagataacagccgccgataacatcactccaactcctaatgttgaagcaaaaatcattgatgaacaaaaatctaaagtggactttgtataaagcattgtataatcattaagcattccagcatttaaacatcctacaattgtcatagaaccaacacagaacaataaacttgaagtaattaacccttcagatattgtatgttttccagtttgttttttaacaaacttcttttctaaataattcacaccattagtcacatgtttatcaatatcaataccctcaccaatcacaaccccaataaccattgagataatcataataagtgtattttcacctttgaatgctccttgaattccaataaagattgaacataaccctaatgctctcatcatttgatcagcaatccgttgagggattcctttattcacaatcataccaattgtacttcccactaaaactgaaattgtattcactaatgttcctaacatacattttactccctatttattcatagaattcaaattcaaaatccaatattgcaaccgtatcacccgcttggactccagccacacgtaaagcatcatcaagtccaatattacgcattttttgcgcaaaacgtttcactccatcatcactacctaaagatgacatttgtaagattcgttcaactttagcaccagtgacacgccaataaccattaccttcattatgaatttcaaatccaacttcatcttcactttcataagtataaagaacgctattttcaatttcttcttcctcagttgcaaatgatggtgtcttatctaataaatcagcaattgcatataatggtaaatcaacaccttcatgaatcaaagcaataactggaaaaactggaatatcatcaccaattttttctttaaatgcttttaaattttcatcagcccctggttcatccatcttattagcaataataatttgtggtctttctaataaacgatatttatattcaccaagttctttattaatcgcaacataatcatcataagggtcacgtccttcagttgctcccatatccacaacatgaacaataacacggcatctttcaatatgtcttaaaaattgatgtcctaatcctttaccttgacttgccccttcaattaatcctggtaaatctgccattacaaaagaacgaccatctttggcttgaacaacacctaaattagggacaattgtcgtaaaatgataatcagcaatttctggctttgctcgcgttacaactgataagaaagtagattttccaactgatgggaatccaacaagaccaacatcagctaacaatttcaactcacatactaaattatgtttttcaccaggttcaccacgttcacaaatagttggtgctgggtttcgacttgttgcaaatcgtgcatttccacgacctccacgtccccctttagcaatcacagcacgttgtttatcctgagttaaatcagctaatattttaccagtatcttcatcataaatcactgttccaacaggaacttttaaaatcatatcagcggcatcagctccatgcatctttttcgccatcccttgttcaccacttctggctttatactcacgatgatatctaaaatctaaaagtgttgataaagatgttgtggcttcaaatataatacttccaccttttccaccatctccaccggcaggaccacctttaggtacataagcttctcgacgaaaggcaacaacaccatctccaccttttccagcttctacataaatattaactttatctataaatttcacattttcaccttcttcctttctttttcaaaaaaagaaccccaaataaggggttccccattaagctactgggtaaacagaaactttcttttttgatcttccgtatctttcaaatttaacaacaccatctacttttgcaaataatgtgtcatctccacctttaccaacatttacaccaggatgaatttttgttcctctttgtctgtaaatgatagaaccagctgtacagaattgtccatcagataatttagcccctaatcttttagattcagagtcacgaccattcttagttgacccaactccttttttagaagcgaataattgtaaatctaatttaaacatcatggtttcatacctccatctttgtgattttcatgtattttgaataagactcctcaattgtttcaagtattgtcacaaatgtctctagtaccacttgtatcacttcatcaaattgatttaccttaatcttaacaaaaccttcttgaacatcaattgttccacgtccctgatctagaaaatgattgttaaccaatgcatttgctattccaacacaagttgtactaactcctgcacagacaagatcttttccatattcagcactatccgcatgacctgaaacctgaatttctaagatttgttgattgttttctttaattataacttgaatcattattcagcagcttcagttgcagcttcttcttttttagcagcagcttttctagctgttttcttaatatcttcgataactaattttgtataaggttgtctatgaccttgtttcttatgataatgttttttaggattgtatttgtagattaatactttcttttcttttccttgtttttcaacttttgctgttacagttgcacctttgatataaggatttccgattttatttgttttatcaccaatgaataaaactttgtctaaaacaactgtttctccttcagcaacatctaatttttctacaaaaatagtatctccaacttcaacttttaattgttttccaccagtttcaataattgcgtacatgatgtacctccttcttttgtaatattctcagactcgccaaccaaggcagctaagctttaataccttttatgtgcggttgtagctagaggtctacaacatttgtatattatcattttcaagtgaattcgtcaatgttttttcaaaataattttcccatctttttctagatattaaaaatagcaccttaaagatgctattggcttctaggatgtgcatgatcatacacttcttttaaatgttgattcgtcacatgcgtataaacttgagttgttgaaagagaactatgccctagtaattcttgaacaagacgaatatcaacaccctgttgtaataaatgtgttgcaaaagaatgacggaaagtatgcggatgaatttttttagttggatcgtagttttgagtcacacgatttacgatatcctcaataccacgattagtcatctgtccaccaaatttattgacaaaaacaaaatgatgttcttgatgttttttagccatcaattcaagtcgttcagtttctaaataatcttgtaaacactctttagcaaaatcatgaaaaggcacataacgatcttttttccccttcccatgaatcaataataactgtctggaaaaatcaatctgcgctaatgttaactctacaacttcacgacaacgcaaccctgaagcatacattaattctaacattgccttatttctttttcctagtggtgctgttatatcaatactatcaagtaaagcaaccatttcatcaatatataagaaatccggattcctttgagattctttcaatgaatcaaccaataaaaaaggattatcattaatatattcttgattttgtaaataacgataaaaccctcttagactactcatcttatgattaattgttttagcagatagattttgttgatgcaaagatgataaataacctcttaaaaaagaatattgaacatcagataaatcttcaatacattcctctcttaaataaagaaagaattgttcaatatctctttgataagcttggattgtcaaatccgaataattcttttggtattttaaaacatcaagatattcttgcatacgtcctctaaaatcagacatttgctaaaaactccttcattgtatcaattgctcgtgttgcataagcttgtttcttttctttctttttcacacgtgttgctaaatctggtaaaattccaaaatttgctttcatcggctgaaaatgtgactcatcgccatgagtaatataataagctaaagaccccatcaccgtttctcttggaaaaacaagcaatgattgtcgatttaaataacgcgccatattcattcctgctaccatcccactttgtgccgactcaacatatccttctacccctgtcatttgtcccgcaaagaataaatcatcacgatcaatatattgatatgtttgttttaagtaacgtggtgagcaaataaaacaattacgatgcatcactccataacgaactatcttagcattttcaagaccaggaatcatatgaataatacgatcttgttcaccccattttaaatgagtttgaaaaccaacaatattataaagtgacccaaccgcattatcttgtcttaattgaacaactgcatgtgatcttttaccaccatctttttccaatccaactggcttcattggaccaaatagaagggtttgtttcccacgtcttgccatttcttcaaaaggcatgcaaccttcaaagaagatttcttcaaaatcttttggtttgacaacttcagcttgcatcaatgcatcataaaaagcatcgaattcttcttcagtcataggacaattgatatattcagcatcacctttatcataacgtgatttataataagccttatcaaaatcaatactgtcttttgttacaattggagcagctgcatcataaaaatagaaataatcttcatgtaataattctttaattgcatttgataatggttcacttgtcaaaggaccagaagcaataatcgttggaccttcaggaatttgagtcacttcttcatggatgacttcaaccaaaggatgtgaactaatatattcagtaattgctttagcaaacccttcacgatcaactgccaaagatcctccagccggaacttgatgttctctagcaaacttaataatcaaactatcattcatacgcatttcttcttttaaaactccaaccgcattattgagtccatcagcacgcaatgaatttgaacaaaccaattcagcaaaatattcacttttatgtgcatcagtcattttgactggacgcatttcatataaacgaactggaatcccgcgacggacaagctgatgaacagcttcaactccagctagtcctgctccaataacatttactttttccatcactatcaactctctttcatctcaaaaagccccatcaagggctttttatttaataattgttttacactttggatatgctgaacatgccttaaattcaccatatcgacctttcttaatcacaattgggctcccacaatttggacaaacttcatcagtcatcactggttcagcctttttcttctcatttttaatatacttacactcaggataatttgaacatgcttcaaactttccaaaacgacctgtcttataaatcattggacttccacattttggacaagtctctccagtatattcaatcttttcaggttcttttttaatatacttacaagttggataatttgaacaagctacaaatgttccataacgtcctttacgaataaccaaatctccaccacattcaggacattgttcaccagttttttctggctgaatttgttccatcttatcataagcattttcaagtaaaggttcaaacttatcctcaaactttgtcaaagcattcacataattatcttcaccttcagcaatttcatccaattcttgttccattgatgctgtatattctacattgataatactatcaaaaaattcaaccaatttatcatttgttaaaactccagattcagttggtttaaatgctttatcaaccatttcaacatattgtcttgtcacaattgtatcaataatacttgcataagtacttggacgaccaattcctaattcctctaattccttaatcaacttagcttctgtatatcttgctggtggtttggtaaaatgttgactcttttgaatatcttgactcatcaatttttcgtctacaacaaccactggtaaaatttcatcactttgtttttcataacttccataaactcttaaatacccatcaaaagtaatgattgatccacttgccttaaattcataaccattattatctaatgctaaacttgttgaatttaattttgctggtgccattaaagaagcaacagcacgtgcatagattaaagaatataatttaaattcatcagcacttaagtattctttcatgctttctggtgtacgcattacacttgttggacgaatcccttcatgggcatcttgaacattttctttctttttagaaaccttaacgcttccaacataatcttttccatacttcttttcaatatagtctttagcttcttcaataaatgtatctgataaacgaattgaatcggttctcatataagtaattaaaccaacagtttcttcaccaatatcaataccttcataaagcttttgagcaatcatcattgtacgctttgctttaaaattcaacttagaagaagcttcctgttgtaacgttgaagtaataaatggtggtttagaggcacgtttcttttgtgttttcttcacatcagaaacaataaattctttattcaatgattcataaacagctagcgtttgttcttcattttttaattcaatctttttcccttgatatttagccagttccgcttcaaaagaaatatcatctttttcaaataatgctttaaccttccaatattcttcaggaataaatgcttcaatttccttttctttttcacaaataagtcttaaagctactgattgaacacgacccgctgattttgatttaatcttcttttgtaataatttagaaagcttaaatccaataatacgatctaaaacacgtcttgtttcttgagatttcacaagattttgatcaattgttcgaggatgatttaaagcatcaataaccgcatcacgtgtgacctcattaaaaaccactcgattgcttagtgtttgatcaatccctaaaacctctgccaagtgccaagaaatggcttctccttcacgatcagggtcggttgccagataaacataatcagcatcttttacacatttctttaattccttgacaacatctttcttatctttatttatcacatagtttggtttaaaactattttctacatctacaccaagaccaccttttcccgttgtggccaaatctcttatatgtccttttgaggaagtcacttcaaaatcagagcctaaatatttttcaattgtctttgattttgaaggtgattcgacaattactaaattcttacccattaatctacctcctagttcactctattattaggtctttttttcaatttgtcaaccaaaatattcatcttccagaatatcttgaatatttgttattaattttgcaccttgtttaatcaattcattacaaccctgaaaatcatcaaaacgacctggtacacaataaatatttttgccttgttctaaggcataacctgctgtaatcatcgttccactttttactctcgcttcactaatcagcaaagattctgataatcctgaaataatccgattacgaaatggaaacaagcgtttttgtggagcaaccagccatggatattcactcaataccaaatgattctttttcatttcttcataaatatctcgattttctttaggataacaataatctatcccagttcctaaaacagcaatcgtctttccattagcagcaattgcacttttatgtgcaatccgatcaaccccacgagccattccacttacaatcgtatagccttctttgactaactgagttgtaaagttttcagttgcttttttgccataatcactcatttcacgcattccaacaacaccgatgtttttttgattaactaaggaaatatctccataataaaataagataaatggtggacagttgatttgtttcagtctttttggataatcatcactaaagattgtcgtatattgacattttaacttcttcttaagttcaaactttaaagcctcatcaactaattcctttttggttaaagcctcatagattttcctataatcaccttcatactttaatgcgaaatacaataataattcttccatatatattttccctcctactactatatacccaaaaaattttcatttttcttttttttattgaaaaaaaataaaaaaattatactttttgtataattttctaaatcggaagggttaattgttcatttaaaacatcaatgacaggttgaaaagaacgacgatgaataggtgtaactccatattgttttaaagcttctttgtgttgtttggttggataacctttatgcttggcaaagccatattcaggataaattttatcatattctttcataatgcgatcacgtgtcacttttgctaaaatactcgctgcaccaatactcattgataaagaatctcctttaacaatggctaagtgttcaatctgatcacctaaaggcatcgcatcacttaatgcataatcaggctctatagcaatatgctcaatcgcatctaacatcccttttttacttgcttgatagacatttaaacggtctacgtcctcaacatcaatcacttcaatttggtacgctaaagcatcacgaataataatatcatacaattcttcacgctttttttctgataattgtttagaatcattaatcaattcattataataacctttttcaaaaataactccacctacaactaaaggtccagccattggaccacgtcctgcctcatcaagtccaatcacatatttctttcctaaatcataagccattttttcaaattttaatctttcacacatgatgtatcctcccatgtgattcttccaatactaccatcattaatttcactaaagaatagttcaatcacacggtcataatctgtttcaccctttaatggtttaatcttacgtaactgagcaatgtgatcaaatgtctttaaaacccagtcaggatcttctaaatcaatttccagttgataacgttcttttaaaattgaagaataattttgacttaaataagtcattgcttcaataaataaatcatctaatggtaaaatattttgtttaatagaacctatcattgcaatatttttagcaacatgttcatcttcaaatttaggccataaaacccctggggtatcaaacaattcaaaatctttagctactctaatgatttgctgagcttttgtaacacctggtttattccctgtgattgtcgctttacgattagctaaacgattaataaaagttgactttccaacatttggaatccctaaaaccattgcgcgaatcgcacgtggctttaatccacgggcaagttctttttccattttttcttttaaaacatgtcgacatttatcaataatcttttgatattcattaaaattcttaagattaacactcatcgcctgataacctaatgattcataatattgaacccattgttttgtaagattttcatctgccatatcttttttagttaaaacaattaaacgtggtttatttttaataatgtcattaatcattggattctttgatgaataaggtgctcttgcatccaccaattcaatcacaatatcaataacctttatcttttcacttatttcccttttggcttttgccatatgaccagggaaccattgaatctgtgccatatgaatcctcctaatctatccattgaatatcgctaaaaggataaatcaccaatccttttactccgataatatcatccaaagtaaacgctcctaattccctagaatcagtcgaacgcaaacgattatctcccattacaaaatattttccttcatcaactttcactttaaaatcatccgtaaattgagaaacattatatgtaattttagattgttcaacaaaatcagaatccaaaaaatcctgattcattttctcaccattaatatacaattcatcctgtttaaattcaactgtatccccaggcattccaatcactcttttaataattttttcatctagcttatcactgtataaaacaacaatatcaaaacgatgaatattctcctcgcttacaccaatagcattaatcatagccacgctttgatcatgtaaagtattttccattgaaattccatctatacgtacaggaatcacaacaaacttaaatattgcaactgttaaaactatgactccaagcatttctaataaagaagctatccattttttcttttgtttatccatcatcatcaccttttcctattatacatgtaaataagctaaaaaactagaaaaaaagtatgggatctccccatactttttatttacggatttctttaattctagcagctttaccagataatccacgtaagtaatgtaatttagctctacgtactttaccgattttaacaacttcaattctatcaatgattggtgaatgaattgggaaagttctttctacaccaacttggtaagagatttttcttactgtgaaagtttcagaaattcctccaccttttttagcgatacaaacaccttcaaataactgagtacgtgttttgtcaccttcttgaatttttacataaacttttactgtatccccagctttaaaatcagggatgtcttttcttaattgtttcttagtaatttcttgtactaattgcatattcataatatgacttcctccttcacaaaatttagtctacgaagttcatacgttttataaccagcggagcttctgcgtccaaagactgaaatatattatcattttttctttataaaatcaatcatttttttgaatttcttgtaaaatttttaattcttcttcactaaactctctattttgtaacaaatcaggtcttttacgatatgtttttaaaagtgactgatgtaaacgccatttacgaatattttcatgatgaccactcattaaaacttctggaacaacacttccatcatattcataaggacgagtatattgtggatattctaaaagtccatcactaaaagaatcatcttcatgagaagtttctcgaatagcgccttctaataaacgaatcacagaatcacaaacaaccatactggctaattcgccacctgttaaaacatagtcaccaattgataattcaacatccacataatctctaattcgttcatcaaatccttcataatgtccacaaataattatcaaatgtttctgctcatgggctaatttttgactatatgcctgattaagcgtttgtccctgtggagacattaaaataactaatgattccttagttaccaaagtttttagacaatccaagataggttgacacatcaagaccattccttgtcctccaccataaggataatcatcaaccttcttatgcttattatcagcaaattctctaaaatcatgcacattcacttcaacaactttagcatcaattgctcttttaataatagacgtgttcaaaaaaccttcaaacatttcgggaaacaaagaaagaatatcaatcttcatcatagaaaccctcaatcaaatgaacatcaatacgtttgttttcaatatcttcagcttcaacaaatgcatcaacataaggaatcataatcttttgttttccttcaactaccaaaagatcatgatgttcatagagctgaatatcttttaccttaccaatcaattcaccctgattataaacttcacaaccaatcaaatctccaacataatattcaccttcatccaataaatcaacatctttatcagcatacagcaaacatcccttatatttttctaccaaattaatatcctgatatccttcaaaacaaaccaagacatgtcctttatgaaaacgatgactttttacaatcatttctttttttacaccattttcatcaatataaagatgtgctcccttcgcaaatctttcttcaataaaatcagttgaagttttaacctttaattcacctttaatcccatgtgtatttacaatttttccaacaatgacctgttccataatttcctccttgaaaaaaaatagatgtgatatcacatctattctccataagattcaaatttgatatctaatttcttgtcatttaagcgtccacaaacagacattaattgacgaattgaattagccatcataccttttctaccaatgagtttagcaatatcctcatgagaagcataaacatataaaacaattgtatcttcttctaaagaaggcatttgtctcacttctaatttatttttatcacttactaattcactagcaatatcttgtaaagtttttacgtagtccacttaaaatcaccagcttatttcttagcttttgcagcatctttagcttcagcgaattttttcatgatacctttttgacttaataaatttcttacagtatcagaaggttgagcacctttgtttaaccatgctaaaacttcttcttctttgattgttactactgcaggattttgtctaggatcataagttcctaattgttcaatgaaacgtccatctcttggcattcttgaatctgcagccacaattctataaaatggtgattttttagcacccattctttttaatctaatttttacagccataatatttcctccgttattttagtttgcctacatataatatcataaatattttatctgtcaagtacttttacttaacacttatattttttctgacttgctttattctacctaattattaagatatgctagttccatatatcctttaaacacaaattgcagttattattttctccaattaaaagttactaatccaaaatcattgttaaacatgagataagtggagcaaccaatccatgatcttgataaagaagcattcctacctttgcaataaaacattatccatgaattttaaatcatttctttttcattagttttgtctttgactctctcacattttagagttacaaaataaaagcaatagatataaatataagaaaatgataaagcaaaaataattaactagtaactatttttgctttattcttaacctataattatttatgacaatactttcatcagttcttcttcacttcttgcatcaataatcttgattgttaaagcatctatcttatcatctgaactttcttctatcttcataatcagttcctttgatacaaatccaaatttgctttttagttgatttacaatggtttggatcttcccttgtttaagtcctctcatttcactttctaatttaaattcctctagtacctgacacatgtctacttcctccctttcttctttctctatccttatgactagttcttcactgtttgtcatgactgctacgactatcgcaacttctttgcttaacaccagttccttgattgtacttgtatccttgttccatctatagattgtctgaactgcactgaccagtgatttcaccttctcatttctgagcaactctacattgatttccttgatatcacggatattccctttccaggtgttcatcagtcccttcagcggttctggaacctgaatacgatccaggagtgaatgaggttgatgccatgtcctgtctccactatacagaactgtactcatgactcccgtaggtctgaaatgctccctgtagtccttatcaatcagcttgtactgcaaatgataagtcattgtatcatagagaagcagcctataaggcatggaatagttaatcgttgactgaatctcaagtccgatgtaaacaggaatcccattgactgttgcatgcatcaatatatcacgccgtctttccatgacattgattctattctcatagacaaaataaattgtttcatcactatcgcatagaagcagctcattcgcatggatgacgtctttcccttcaaaaagcatggcattgatgatatcggcaaaatgggccttgaccttaaagaatcctcttaaaatcttatcctgtttggactgttgttgtggttcttgatatgtaagcgtatttatcatatagattttcctcctttttatagttgagaaactctaaggaaatataacccctatacttatatatacgcttgcaaagtctcatttttcttctttttaaggcaaaaaagttgaaaaagttttttgatacactcctattatagcacaaagcaaacatttatcaattgcttaaagcaaaaaaaggtttacttttgttgtaaacctttaaaattacatttttctctatccattgctttctatttcattcattattttttctttttcttcttatgtctttcttttttacgataaggattaaaagtcatattttgtttaggtttttgagtaggcataccagtcactggatctaaattacccatttgtttcatcatttgtctagaggcttcaaactgtttaattaaacgattgacatcagccacactacgtccacatcctttagcaattctttctttacgcttagcatttaagatatcaggattacgacgttcttccttagtcattgaatagataatagattccgtcatttttaattttttatcagtatcttcatcattaatttcaggcatttttggcattcctggaatcatttttaagattcctgataatggtcctaatttacgaacctgatgcatttgatcaagcatgtcatctaaaccaaatgttccttgttgcatcttttggaatgttttcattgtgtctttttcatcatagacatcttgaactttttcaactaatgaaacaacatcccccattcccaagattctatctgccatacgatctgggtagaacaaatcaattgcatctaatttttcaccagtcccaataaatttaattggtacatgtgtaatatgacgtacagataatgcacccccaccacgagagtcaccatctaacttcgttaaaacggccccagtaattcctaaatgatcattaaatgattgagcaacattaacaatatcttgccctgttaacgcatcaacaaccaataagatttcacttggattgacgattcctttaatattttgtaattcttgcattaatggttcatcaatatgtaaacgaccagcggtatcgattaaaacaacatcatgatgattggcatatgcatagttcatagcttcactgacaatttgttcagctgagatatctgttcctttttcaaagacaggaatatctaattgttgtcctaatgtttttaattggtcaaccgcagcaggacgataaatatcggctgcaacgagtaatggttttttactatatttattaactaataacttagcaatctttccagaagtcgttgttttccctgacccctgtaacccaaccatcataatcactgttggagtttttgataaattcaactcactaacacttgttcctaataattctaccaattcatcatgaacaattttaacaacaacttgtccaggttttaaagaacctaaaacatcttgtcctaacgctttttcctttgtattggcaataaactccttaacaacttggaagttaacatctgcttcaagtaatgctaatctaatctcacgaagcatctcatccatgttttcttcagttaatgttgcttgccctctaattttctttaaactctcttgtaatctttctgaaagagactcaaaagccataattcaccctcctatatcttctttaacatttctaaataatcatttaattcttctcttgatgtttcttgttcagcttcaatcctttgaattaaatccattctttgaatatgcttttcaagtaaatgtaatttcttttcataatcttctaaagatgctactgctctttttaaattatcataaacagcattacgtgagacatctaaatcctcagcaatctctgctaatgaaaaatcttcttcataatacagcatcaaatattctttttgtttatccgttaataattcctcataacaatccatcaacaaatttactctttgtttcttttctaaatttgattccatatcactactccattaaattcttgcataaaccatagatatattgttcaagatcaaattcttgtaaatcatccatgctttctccaagaccaatgaatttaactggaatatttaatttatctttgattgataaaacaattccacctttggcagttccatccatcttcgttaaaacaattcctgtaatatctgtgattttagaaaactcttgtgcttgagaaataccattttgaccagttgttgcatcaacaaccaatagtgtctcctgtggtccagcaggaacaacacgtttaataatacgattcattttttctaattcgttcattaaattgactttattttgtagacgtcctgcagtatcacaaattaaaacatcaacattcttttctttggcttgatttaaagcatcaaagacaaccgatgaaggatctccaccttcttttcctttaatacattcaattcctaaacgatcagcccaaactgctaattgatcaatcgctccagctctaaatgtatcaccagcagctaccataacagattttccttcttgtttcatcatatgtgcaagtttcgcaattgtcgttgtttttcctgctccattgactccaaccatcaagataactgttaaatcattatcatcataattaatctttgttgtcatataagaatcattagcataaataacaaacattttatcgacaataatatcattaatcatttgtgggtctttaatattttgtaaacgcacttcttttttaatttcatcaacaatggtcataaccattgaaacaccaacatcactcataatcaagatattttctaattcttcaaaataatcatcatcaatctcacgataacgtgctgctaattcattaatttttgatgaaagtgatgatccagatttatccaatccagcaacatatttctcattttgcttagccgaattaccaacaattgcttctttaatcttactaaaaaatcccattgttattcctccttatgcaccagccaagtcaattgcatctttcaatttaacactgactagctttgtaacccctttttgttgcattgttgcaccatataataaatcacattcttccattgttccttctctatgtgttacaacaataaattgggtttgggttgaaaactctcttaaatattttgcaaatctttcaacattcgcaacatccaatgcagcttcaacttcatctaagatacacattggaactggtcgaacacgcaagattgcaaataaacatgaaatggcaatcaaagccttctcgcccccagaaaataaagtaatattttggacggcttttcctggtggctgtacatcaatatcgattccagtttctaaaatgttatcaggatcactatatcttaattcagcttttcctccaccaaaaagatttctaaagacaatattaaactctttattaatcttttcaaaggtttcactaaaacgactaatcataatttcatccatctcatcaattgcctttaagatactatcttgtgcattgattaaatctaacctttgactattcaatgtttcataacgggttgaaacttcttgataatcttcaatcgcctgtaaattaacattccctaaagaatcaattttatgacgcaataaacgaacattttcttttgcttcacccatattgatttcttgtgtatattcttccttagcaaattcataagtcatcttatattcatcatttaaacgcaataaataattagataactcagtttcttgtttagctttattgacttgtttttgagtcatttctgattgaatttctcttaaatgagcacgtgacgctcttagagtttcttctaatttatcattctcattgacaaaactcatacgtaattcacgttttgcttgaatagattcagttaaacgatcacgtaatttctttgcttcatttaattcattaatcaattgattatcttgagcaccactttcaatctctgataattcaacactacgatgagttaaactttcatattcactcttagccacttgaagttcacttttcttatttgtaactacaacttcaagcttagcaaatgacatttgtttttgcaataaatgatgagaaatttctcttgctaaattgtccaattcattcaattttgcttttttatgattaatttctttttcttgactcacaattatctctttaatcatctctaattcacgtttactcgcaaagttagatgattgtgatttatttgttccaccagttaaagaaccaccaatattaacaacctcaccatccattgtcacgactttatatctagcaaaaatagcacgtgacaaagctgatgcatgttttaaagtatcaaccaagataatattccctagctgattcaaaacaacactttcaatttcttgaggataacgaacaaaatcactcatcacacctaaataaccatcaaaattttgacataccatcagatgatcatctcttaaacttcgaggtttcatcacttcaacaggtaaaaaagtcgcacgtcctgatttattttcttttaagaaatgaatcgcttctctagcatcttgatctgtctttgtgacaataaactgtactgccccagccaaagctgtcgttaaagcagtttcatattgagcatcactttctaataaatcacctaagactccaatgattcctgataaagaatctttagccttcatgattgaacggacaccataactataacccgacttattttcaacaatatcaaccaattgttctctacgatttcgattgttatgtaattgaagatttaagttttcaatattttgacgtaatgccatcatttcactacgattcttttcttgtgcagcttctaaatctaatttttcttctttggtttctttatatcgattaacacgatcattatattcattaacagcatcttgtaaaatagctttcatctgagcaatacgcgcctgtaaatcttctttatctgtattttctaaaatatgtttacgattggtatcaatttcaactttttgagtttctaattcattaacattattcatagctgttaataattgtccttgtaacccattgacttcctgatccaaatcatacatcttcttttttaacgtttcattttgttgttcatttaaaagaatctgaccttcaatagttactttttctttatctaaagaatccaaagaatcatttaattcttttaaagatgcagataaattttcaatttccttaaccaatacactcacttcaatagactgcaattgatcctttaattccaaataaacttcagccttttctttttgccttcttaatggcgcaatttgtttttctaactctaaacaaatatcctcaactctatctaaattatcctttgttctctctaatttacgaatagactccaacttacgctttttatattttgcaacaccggctgcttcttcaaacatcccacgtctttcttctggcttactatcagcaaaactagaaatatttccttgtgaaataatcgataaagaatcacgccctaaccctgtatccataattaaatcaataatatcttttaaacgacatggttcacgattaatcaaatattcagcttcattattttgacgataaagacgtcttgtaatttcaacttcattataatcaaaattcataaaacgatcttcattatcaaaaaccaatgttacctcagcaacactttgtgctttacgatcttcacttccattaaaaataacatcagacatattagaaccacgtaacgatttaactgattgttcacctaaaacccatcttacagcatcactgatattggatttaccacaaccatttggaccaacaattcccgtaattcctggctgaaattcaataactgatttatctgcaaatgatttaaaaccatgtaattctattttctttaaatacatagatttctttcctttcctatgaatgattatctctgtcttttttcatcaatctttcactcaaatggaaagatctgacttgtggtaatttaactataaattgactaccaccatcttctcttgacttaacatcaatcgttccttgatgtaaatcaacaatccttttaacaatcgataaccctaagccatttccttccacacttcttgatttatcttgtcgataaaacctttcaaaaatatgcgaaatcgcttctttactcattcctacaccggtatcttcgatacttacttctacttcttttgttgtctttttcacactaatagtgacaaccccattttcattcgtatacttaattgcattattcaccagattaatccaaacctgttctaatcgtgattcatctgcttcaataagaatatcatttttaggaatatcaaattcaatctcaatattcttacttattgctaaattatcctgtgtttcaatcacacgatttaattgttcaatcaatgaaaattcactgacttctaatttcacatcttcaccatctaggattgttaattgtaacatattcctagataaagtcgataaacgtttactatgaaacaagataatatctgcatatttttgtctttgttcatctgttaacttttcattttttaaaattgtagcaaaaccttgaattgccgttaaaggcgtttgaaactcatgagaaacatcagaaataaattgttgcctcgtttcttcttgttttgctaattgttgagccatttgattaaaactgcgattcaaacgagcaatttcatcattcccactataattaacacgaacacgataatttcccttagacaattcattagttgctttatttaaacgtgaaattggtttaacaataatatcagcaataaccaagaaagtaatacttcccgcaattaacatacaaaaaacagcaatcattgcagaatcaataaaaatcatttgttttttaccaatatctttttggacaaagacaatatattgttgaccattcacttcaaatgattttgctaacttacgcattgaagaatcatgtaaagtaatggttttacctaattgattttctaataattgatgttctttattcgtcaattgacgacccgtcaatgttccataaacttctttatgattttgactttcaatggaaaaagaaacttcagaagttgaagcataaccatttaaaacttttggtaaattctcattatcaattaattgtaaaaaatcagcaattaattcagttgaattttctaattcctcaactgtcaaacgactcaattcatcagaattcttacgcaatgaaaaatatccagcaattgaaaagctaaacaaaatacttgctaaaaatcctaagattaatttcccatagatggatttcattgttcaacctcaatcttatatcctaatcctctcactgttacaaccttaaatccaggtaaatgccctaagttttcacgaatacgtttgatatgaacatcaacagtacgatcgaatccatcataatccattccccaaattttttcaatcaattgttcacgagtaaaaatttgattagggtttttggctaactcaaaagctaattcaaattgttttaatggcaaatgaatagtctcatcatgataacgtatttcatatttatcaccatcaaaaataacatctttaatttgaacaatattctgactattaatactataacgttttaaaattgttttcactctcgctaataattcatcaggatcaaaaggttttgtaacataatcatcaattcctaaagaaaaacctcttaatttatcagccgattgtgatttcgcagttaacataataactggaatatctttaaattccttcatttcttcaacaagttgaaaaccatccataactggcatcataatatcaacaattgctaaatcaatatattcattttctaatatctctaaagctttttgtcctgtttcagcttcagctacagaaaagccttctttatctaaataaaaacgtatcaactctctaatatgttcttcatcatctacaactaaaattttagatttcatgattatccacctcaattcattgtgtaattatatcataattacaaataaattcctatatttatcaagagatttcccactttgaatcctatttttttaagaatatattttatctaagcaaaaacgatatctcattgatatcgtctttgcttttaattcttctttttaaatattgagaaaccttttttcttttgagatttgcctttaatttcttttaataaatccttagcatcatttaaaccagcttccacagctttttcacaccaaggtaaagctttgtctaaatcaatatcagttccttgtccataagtataagctctcgctaaatttaaataagcatgttcatcgccacctctagcagctctttcaaacaaacggaatgcttcatcaaaatcaagctctactccatcgccttctttataacaaacaccaagattattcatcgctccataatgtccatgttccactgccattttataatattcaatggcttttggcatatcacgatatttttcttcagcttcaaaatcatacaataccgctagattatacattgatgaaacatgtcctttactagccccaatcgtaaaatattcaatggccttaggtgtatctttatcaacgcctacaccagctttatacagatttgctaaagcatagtaacctctagaaaaaccttgttccttagcttcattataatattcaaaagctttcatatagtcttgcttaacgcctaagccactttcatacaattgtccaagtgaaatataagcatcaatataatgacgatgataagcttcttgataataattcatcgcggcctgataatcaacttctgttccaattccatagtgataacaacgtccaacattgtaataaccacgtgatgaattatattttgatgcctcaagataaaactcaaacgcttttctttcatccacagctgttccaattccatcctcataacaacatgctaaattacagattgctggaggatatttatagctagcagcttcttgataatactcaaaagctttcttctcatctacttcacaagcttttccaagttcatagaacaatcctaaattagataatgcacgtggataacggctttcagcagatacactataccaatgtctcgcttgattcaaatcaacctctacgccaattcccatttcataacaatatcctaaattacattgcgcaacatcatcaccaagttcagccgcttgacgataatattcaaccgctttttcttcatctttttcaacccctgtaccttcttcataatataaacctaagttacataaggcacgtggatagttaaactgagctgcacgttcatataattctctagctttatcataattggcttcttgattatcaaaaccaatttcatataaatttgctaagttacataaagcgcgtaaattattacgttcacttgcttgttcataatattccttagctttttgtaaatctctttcaacaccaattccagcttcataacaatatcccaaattacattgggcaacgtcaaagcctaattctgccgcatggcgataaacttcaaccgctttttcttcatccacttcagttccaattcccgcttcataacaatatcctaaatttgtcattccacgtaaatttccaccagcacttgaacgttgataatattcaaaagcttttttaacatctttaggacaccctaaaccattttcataataatatccaattgtacacattgctgaaggatcaccaacatcactagcacgattgtaatagtagaaagctttgctcatgtctttttcgactccaataccttcatcataaagatatcctaaattacataaacctcttggataatcaaattgagcagctttttcatattgttcaattgctttttgataatccggttccccatcaattccttgttcatataagaaacctaaattacaaattgcacgtaaattgttttgagcagatgctttttcataatattccttagccttatgaagatctttttctacgccaattcctgcttcataacaatatcctaaattacattgcgcaacatcataatctaaatccgctgcacgacgataaatttcaacagctttttgaggattttcttcaactccaatccccacttcataacaatatcctaaattggtcatacctcttaaacttcctgcatcactagaaagttgataatattcaaaagccttttgtaaatcttttgtacaaccaattccattttcataataatatccaagagtacataaagcactagggtcttggtattgagctgccttttgacaatattcaaaagccagattttcattcttttcaaccccaattccattttctaaataataagaatatttacacattgcataaacataaccaatatcagcactacgttttaaatattccatagcaagtggcatattttcattttcaatgagttttccataagctaacatagcacgaggatatcccatattagcacttcttaaataaagttctttggctttttcaacatcttgttcaacaccaattcccatttcataacaataagctaaataacaatgagcaggcgcatagttttgatttgaagcctgttgataccaataaactgccatttcttcgttttgttcaacaccttctccagcttcatagaaataacctaattgtaactgagctacttctaatccatcattagctgcttcttgataccatgaagctgcttgagataaatcttgaggaaccccaattccatattcataacaataaccaacactatatttagcttgaataaaaccagcatcagccgcttgtttataatgtgtcatggctttgataccatctttttccacacctctaccaaaacaataacattctcctaaatagaataatgcacgtggtaaatttttagctgctgccttttcaaaatattcaaacgctaattcatcattttgttcacagccaattccttcatagcaacaaaacgcaaaattacatgaagcaatttcatcatctaaatccgctgcttgtcgatagtaataaacggctttttctttatccattggtgttcctaaaccaacttcattcatataccctaaagaacaaatcgatttggcatgattatttttcgctgctttttcaaaaagctcataagcacgatattcatcttgcacacgttctttaccattcatataacgaagtgccaattggaataaatcttcttctaaaaccggtgtttcatcatcatctaattttggtaaaaccgataacaaacaaatatcaacaccttcaatatgatgatcattttccaaataataatgttcttcttgtaaataaggcgaatttgtcagttcaggataagcaacaacatcatacttcatcattaaatcaaagacgcgcccttcaacttcttcttcaggacaatataatgttttcactttcattaaagcttcttcatcacgatcattttttaaataaacccaagccatatcaccataattaatcgcaataaaatccactttccattgaccaaacaatggttcatacatttttaaacgttctaataattcattcattatttcccctccttattttctatccgatttttaaagttgaaactgtttgacttgctgaatcatcatcaacaaattcaatactcacttgatctccaacttttagtaatggtaactcactatttaaagaaattggtgcaataaagactttatcttcaccttcaattttaaaatagtaatgtgaattgccattcacgacagcttcttgaatcgctgtaatcttagcttttaaactcttagtttcaaaatcaaccttcactttaccattatcatttaacaattgataatactctttttcagcttctgcaacactatttccaacggctacaatttgataattttcaacgctaacaaacgcataacttttaactaatcctgcactatcttttagtgacaagaaataagttggttgtccaccagcattaatcaagattgggaaagttgctgtatattttaagttttgcacttttccttctgctgatgacattgcagaaaattcttcagctccactgattgcataatatttagcttcttttgtacgcatgttaattaaagcaaacccaacattagaagcatcacttgatactgatgttaaaccagtatacaaataaacatcatcatttaaagcaatatagttatatccatctgtaggttttaaaacacccttttgagagaagattgtattgaaatatccatttgtatattgaccccaattttctaattgcgttaacaataaatttgatggataaacacgatcaacccaagttggaactttatcaatgttataatattggcaactaccatcaatcgcattaactaaaatagctcccgtaatatctttaccaccaaataatccaattttataagtatatgttggagcaatccaatatggattcccggcatcatctatttcaaaagatggattttcaaacatcttcgttggataatgtacacgaatatgacgattaatattcctaaagaataaatcagaatgagaatatttcattccttcttttaaacgaacaacttcactttcctgagtaaccatatcaacacgaatataagcaggtaacccttcaccatgattagtaaaccatttaataaaatcactataagaaatcgttgtaacacgatatggtttatctttatagttgatttgaccatattcatcatcaacttcaaattgagaaacataatcaacaatttctcccattttacgatcacctaaacgttctgcactatctttatcaacaactggtattgattgataattaacttttgggttatcagcataaaaatcagctttcttatcaacatttaattgtttttgataacttgaagcatggaaaattggtgaactgattaattgtccaataaaaacataggcaataaatacagcagccaatccaacaaggacttttccaaccttatcaaaagaagcttgaaataaacttcttaatcccacaaaaataattaaacaaaaactcaaaaagaacacaaaatctggtgatcttaaattaagtggcaacattgtaaaatattcagcaatcaagaaaaataaaatgacaatgatagctgccttcaatgttcctttcttttggggctgacgattattaaaaaagtcactctgatgattttcccccatctttccaaaaaatctttcaaatactttatccattcattttctcctttaatttctcaatcaaatcttttaattcatctaatgattcaagcgttgccccacttgcataggcatgcccaccacctcgaaaagcattggccacctcattgattgctgtgtgacggctacgcatactgacacgataattatgttcctttgtattttcagtaatggccatccacacttcaaattcttcataatttgcaagcgtattcacataattagagccttgttcacgtgtgagatgaagtacatctaaatcttcttgacctaaataataccaagcaatcttaccatctctatgataatgatttaaaataaacttagtgacttctaaatcattcaaatcacgcatatataaagcttgatataattcttcaattcgaataccactttctaataaatatgcagcggcttcaaaagtcttagctgaagttgaactatacataaaacgattactatcaccaatgattcctaaatacaaagcattcgctgcaataagtggaattttaactcgtccttcttttaaaagtaatgtaacaatttcactacaagatgaagcactctcatcttcaatatttaaatcaccatatgaatcaacaacaatatgatgatcaatctttaaaaccttatcacaaattgtgatatccccatcaattcgttcacgattagccgtatctaagacaatgcctaaagttgaacctttttgaatgtctccaacttcaaaagaagcatacatcttcaataaatcactttccatatttccggctaaaacaatattcttttggggaaacatttctttcaatgtccaatataaacctaactgtgaacctaatgcatctaaatccggattcacatgtcgataaataattatttgatcatattcttttcttactttaaatatcctatccatttttcatcaccttatataatatactaccatagaatgaccttaatatgaaccataaataacaaacaaaaaataatctcctcaacaaaagagattatttaatcaaccaaatgaattttagatgacttttcattttctaaaacatatcgccaattcttaggaaaagaataatcttttaataaatcaactaaaccactttcacggcctgcttttctcaataaaatgcctacactatcaataaaatcttcagcattaaaaacattgggagaaagacgaatcataatcaaagtataataaaataatgaagaatgcttaaaatcatcatcataaccattactatctacatctttagtcataatcggtcttaattcttttaacgaagataaacgatagagactttgataatgtgcacaatgatttcttaaattatttaagctcatcatccaatgccaaaatgtttgaggcgttaaacgttcaaaataacatcttaaatattctgctttgtcataataatttaagttttcaaaaacattaatcatccaaccaaatgtcataattcctgctgccgtagaaaaaggtaaagcatatttataacgtcgatattcttcaactatctgtaaattattatttttgatttcatcatcaattcgattacgtagtaattttacttgatcataatgttcttgtttatcttcaaaaagatttcccattaaatagccacgcttataaaaaggttgataggttgaagccattaaatatttttgatcatatttattagataaaaaataagtaaagctagaacgaaaatacatttcaatatcttctaatatacgttgatattcaaatcttaaagaacgatctagttgaataattgtttgtaaattatcaattgacatcgctggtgattttaataaataagcatgcactttatcatagccaatttgatagacaagtgatttaagccaggcgatttctttttgatcttctttggctaataattgaacaatcttttgaatattaaccggattatcttccacactttcttttaaaacatagaacttcccaattttcataacctcatccgtattttgaataggaattggtaaaggttcttcaactatttcttctttttcttcactttgaataaagtcttctacttctttttgggcaacactcaacaaacgacgtaagatttctttatttttaagaccactttcacgaatatctaaaattaattcttctagtttcttaatcatttcttcacaatctgttaattcatctatttgattatagaattgataaaattgaataacaaacggattttctaatagttcttcaataatttgtgattttttataatagagatgatgttgacgataaaaggcttcaatcaattgtaattgctgttcatcaggcattggttgagttggtagtgaatctattgtttcgttatattctataggttgttgctgagtaagatattctaaatattgttgtagagtttgtaaaaagcgatgaatgaggggatattgttcaaattcatttggttcaattggaagtttatggagaactttcaccttgagttcttctaattgcgttatttttgtttcttgaggcagctgacaataataaatatcatctaatttttttgttgccttatgcatgattttctcaatttttttattgataagatcttgttgtaggagttgttcttctttgaaaaatgcttgtgcaacaacgataagatagtctttattatgttgaaaatatgcatcaatgatttgataaagaacttcacctttttcatgacttctttcaagataatcatttttgtttgctttcttttcaaagtaatatctagctagcaaataatgggttattgtttctaagtcttgtaaattagcttgcgaaagattttcaatgacttgttgtagtgttatgatatgtaagtattctttttgattttgaattgtttcaataaaaaaatgatagtattgtaattcttgtaaaagagctgcttcatttttaaaatcagaatgttcaatcacccattcaaataaaggtcttttcacatcctcatctaattccttataaactcgactcatcatatccaaaaatgttggataatcatcgtttaatgaggcttttattctttctaagatcaattcattttgttcgtgatgattcagtgattcaataagcatctttttatgttttttctcatcattagcaaattgaaagacttttctaaaatcttgattatcccattgtttattcaagctcatcacctccttatgattattatatcacatattttattgaacataagaaaaagaacccgtaggttcttataatcctaataatctgactgtatctctagcaatcatgacttcttcatttgttggaataaccatgactttgatttgtgaatattgatgtgaaatcactctattttctgaacttcttactgaatttaattcttcatccaagaaaacaccaaatgctttagaaacattgtcaatgattaaacgtcttaaataagcagcgttttcaccaactccagcagtaaaggcaatcgcatcacaaccaccaagttcagcataatatgaaccaatatatttagatacaatacgtgcatataataaacttgttaataaagcacgttcatctccttctttaaataaagcattttcaatatcacgagaatctgaagaaataccagaaattcctaacatccctgattttttgttatagatttctaagacttcatcaggtgttttatttaatttattacataaataaggcataattgatggatcaacatcaccacaacgtgttcccatcataactcctgcaagtggtgtaaatcccatagatgtatcaatacattttccatctaagacagcagaaacactagctccatttccaaggtgacaaacaatcacacgagaacctcttggttttcctaacatttcaatcacttgttctgaaacatatttatgacttgtaccatgagctccatatcttctgacttttaaatcagtataatattctaaaggtaatggatataaatatctttctttatcaagtgtttgatggaaagctgtatcaaatgtgaaaacatgtccgactcctggtaaagctttttgaaaagcacgatatccaattaaatgcgctggattatgtaatggagcaagctcgcaaagctcctctactttactaacaacatcttcatcaacaacagcactatcactaaagtattcaccaccatgaacaatacgatgtccaacggcatcaatttctgttaattcttttaaaacaccttcatcaatcaatgcttctaaaagcatatctacagcaacttgatgatctggaattggacaagtttttgtctttttctctccattatatttaatcgtaaaaataccatcatccattccaattctttcaacaatcccagaagtaatgacttcttcacttggcatattgaataattgaaattttaatgatgagcttcctgcgttaaccgccataacttttgtcataattcattcctcctacatacatatatttattttacctaaaataaagagtaaatacaacaaaaatttgaaagcgataacattttttacatgaaaaaaccctactcataaggttttatgactagggtttttattgagcttaatgactttgagattgtctacctgcgatttggttttgtcccatttcaactaatctcttagtgatttcaccaccaacagatccgttagcacgtgaagttgcatcaggtccaaggttaacaccaaattcattagcgatttcgtatttcatttgatcgattgcattttgagcaccaggaacgactaatttgtttctatttgaattgtttgagttcataactttcacctcctgacacaattagtttgtgtcaaggttacaaaattattcattttttttaaaataaattttcaatatttttataactatcatcaatcacaatatcttgcgtattttcaacacattcttgaaccattgtttcaaaatcccagttagcttcaaaagcttgtgctttatagctttttggttttgttgcaggttgttttggcgtgaaaattgtacagcaatcttcatgtggacgaatagaaatatcatatgttccaatttttgttgcaatatcaataatttctaatttatccatacaagccacaggacgtaaaactggcatgtgaatcacttcattaatagttgccatactttctaatgtttgtgaagcaacttgtccaatactttctccattaacaatcgctaagcaattatttttttgagcaaccccttgagcaatacgatacatcattcttcgcataacagtcatcgcatagctttcttcacaatgttcataaacagctaattgtaaatcagtaaacggaacaatatgtaccacaattttaccatgcgtatattgtctcaagacatcaactaaatctaaaactttttctcttgccaaatcacttgtatatggtggtgaagcataatgaatacattcaatatctaccccacgttttaaagttaagtatccagcaactggagaatcaattcctcccgataacatcaataatgcttttccaccaacaccaacaggataaccaccagcacccataatcacattatccataacatatgtataatctttacgtaattcaactttcactaaaatttctggatgatggacatcaacctttagagttttacttgtatgatggaaaatatatcccgcaatggctgtattgatatcatgtgaatgtaatggatagtctttatcattacgtttggtatcaattttaaaagtctgtcctggattattttcgacaacttgcagacatacttcttttattttttctaagtcactttccactttataacaaaatgaaaatgaatgaatcccaaagactgttttcaatttctcagccacagcctttggatcttccccatttaaaataatatacatacgatcaaaagataactcatatttcaatcgactcattggttttaagatttcttttgtattttgacataatttacgaataaacatttttcgattttttcctttggttgttaattcaccaaagcgtactaaaatatgattacattccatttttctacctctgtttcttaatagtttttaatattgtttgaagatgatataaaaattcatcaatttcttcttgagttgttaaatgtgagaaacttatacgaatcgcacttttagcaatagcatcatccacacccattgcagctaaagttctagaaacatcatttttatgtgatgaacatgtacttttcgttgatacataacattcctttgcttctaaagcatgtaagataacttcgggtttataaccaatcgctgaaaaacttaaaatataaggtgagcaattttcaattggactatttataacaatatctttttctctcattaactcatttcttacatattgatttaaagcatgaacatgttgaaatttttgtgcttgattttctaaagccaaacgtaatgttttagcaaacataatatgagtagcagtattagaagtcccaccacgtaagttgttttcttgttgaccaccacaaatcaatggtaccagcgttgtggattcttttttatataaaacgccacttcctttaagtccataaattttatgagctgaaaagctagccatatcaaccaaagacaaatcaaccggaatttttccaagggcttgaaccatatcaacatgtaatttaattttaggattcatatttaatattaattctcttattttatcaatcggttgaatacttccaatttcattattcacatacatgattgaaattaaaatcgtatcatcacgaattttattttttaattcatctaaatcgatatgtccattttgatcaactgaaataaaatccacatcaaaaccaaaaacatctcttaattgtaaacaagtattatagacacttgaatgttcgattgcagtagtaataatatgtttccctctattttgatattgaaaagcacaacctttaattgccgtattattagattcacttgcaccacttgtaaaaataatttcagttggtttaacatttaacatttgagcaattaagcttcttgacttttccattaatgaactagtttgtaatccaagtgaatataaagagtcagcattagcaaaataatcatttaataatgattgatacatttgattaacttctttatttaaaggtgttgtagatacataatctaaataaatcataggttccctccatatctcattatatgtatatataccattttttatgaaaaaataccactaaaaaagtccttattcggacttttcagtagattttttgattaatgtttcatatgaaccaggttgaatcttttcaataatatcaacagctgttgataaagcctttgtatattcaccatttctaaataaaacttcagcctttgttaattctgtattcacttctaaaaatgttgaacgataacgatttccaaaaacaatagcttcttccaccatttccgcagtaacaatcaaattatgaacattatcataaagcttataaatgacatctcttgcgccatcaacacgcttagacaattctgataattcaactggtcgattcatccgatatgcttgaatttgggccgctttatcataagaatcttgaatataatctttatatgattcattaatcattggtaaatgtttgttttttatttctgatttaatttctaataatacaatattaatattttctaattcatcaatagcacgttgttcttgtaaatataaatgatccctaaaagcaaagaaagtatttaaatcatcttgatgaacacttgcacaatcttttaacaactcaacctttgcaatcatttgtgaataggcaaaatcacccttcttcatttcttcttctaaatcataagactctcttaatattttatcaaactcttggaatctttcatcaatttcaatatgttcctcattaataacatataaactattaatacgattagaatcaatcagggcttgtttatattgatcatagatttctgtaatcaaactataacatgtatcccatttttccttaaattcatgataagcttgttgttcaacttctaaatcatgaatcagacgatcaattgcatctgcttcaccttgtaaaatagttcccatatcatctaattcaagatgtttaatatgaacaacacattcttctaatgtttttttaattgaatcataacgagaatcaacctctaactgattcaaagaaaaactctcttttgacatttcttcaatcaatgtatcaatatgattaatctttttaggaatatattgtctgacaactgcaatatagcttggcaaatcttctaatcgttgattcaaccaatcaactctttcttcaatttcaccagtaaagttttttgcatcttcaaatctttgattattcatcattccttctaattgaacaaatgaatcatcaacttcattaaatatatctaaaagacttggaacaaattcttcaactttaaaacgaatggattcaaattgatcaattgtttgacgatatttttcttttactcgaataatttcaattctttgaatattttcaatttcagtaattttttctattttcgtaagtaatgcttgtgaatcattttcataaacatcaagcatttcatttaattctttcatttttttcgatacttttcttaatttcccatagaacaactgttcatcaacttcattgactaaaactgccaattcattcttttgaaaatcactaattttttcaaattcagcggcatattcttcatattgttcaacaatatcaggcatatttttagaaatactttgaactctgcctaagcgatattgtaatggcaatgatttgattgcattcatacgattttcaatatcaacaattaattttctatattttctaagtctcattccacgataaaaaaggaataaaataatcaaaacaaccaatcctacccccgcaaagatgagattacgtgttcctattttttcaataaactccatgattccatccatatatccaaaatcctttcttttacactcctttattgtatcataaatatcgtaagatttcatcatcttttcaacaactcatcccaagaaaaaattgaatcatgtttttttaacaaaaaaagaaaacgctcaagaatattgatttaagcgtttgtatttattgatattaattcatgacatcattagctgtagttttgtgattttgatatgactcttatagttcttgacatcatggcttcatatttataagtctctttaaaattattaacattacaatcacatatgtatactaaccatcttagtaaaaaaaaagacaccgaagtgtccttttcatgattatcctaaacggttgtagtattctacgattaatgcttcgttgatttcttggtttaattcagatctttctggtaatctgatatatttaccttccatcttttcagcatctacttctacgaaaccaggtacatgagtttgagaagctaaagcagttttaataatttctaatgatttagaagattctttaactgaaacaacatctccaactttaacttgacaagaagcgatatcagttttaacaccatttaataaaatatgtccatggttaactaattgtctagcttgtcttcttgtagtagcgaaacctaatctgtaaacaacattgtctaatcttgattcaagtaaacagaagaagttataaccagtgattccttccattttgcttgctcttttgaatgtgttatggaattgtttttcattaactccatacatatgtcttactttttgtttttcagctaattgtaatccatattcagttggtttctttcttttttgaccatgttgcccaggagcataaggtctttttgataattctttaccagtttctaatgtagaaaatcctaaacgtcttgattttttccattgtggtccagtataacgtgccattattttttcctcctattgttttatttggcataaaacaataacattcatagatccgtcaggttgtgtttgtactaagtatttctctattagcagccagatactttacatccgttcgttacaaacgcattggctaacactctatgtgctgctatcatttattgcactagctatttataccatattttctagttactgtcaatatttttcttttcatcaaattattttacaaatgaacattccaataacaaatctcaaagatactttttctttgatacaagataacatgatgtgtttgcttagctttttcataaatattttttgaacattctaatttcacatgtttttgttgtgaggtatcaatatataaataatagcttgagcctccttttgtcgtatgaatctctttaaaatcaacaacttgaacttgttcatgtacaatatctttacaaaataaccgattccaactataacttgatacaaaactataaaccattaaagccataaccacacctaataaacgagttaatttctttgaacgctgataaacaataagaaatggagtaaataaaacaattgttatcatcacaatcatataaaaaaagcgggtcatattttgaatatttgccatatatgataactttaaaagaacaataatatctattcctacaatgatataaggaaaacctaaatgtgacgatttagatgaagtatcaaaaaacattgttggataaaaatagatataaagtccataccatataagtggtatgataagataaataataagctttattgaatgattaaagaaaaacaatgagacaagcataaggacagcgcatattatttttaatatgtccagtctttttttcatttgttgttccaaggaagtccaacgcctttgcatagaagtattagtttttttagtttgaaatgcatgtgaatatttcttttgaattggaatattatgtttcatgaaatgcgaaatcaaatcttcacttccaatcatattatcttcaaatgaagccaatttttgatggtttgaacgataaagacgatattgaatgtgattgttttttattatcattaaacaataactgatatcggtataatcaaaatatttcttaataccataaaacgaacgtgaataacattcttcttgcgttatgacaacacatcttaataaagcatctaaaataagcccaattcctaaaagagtaaaactaccaaagataaccccacacaaaacaatttgaacaagatcatgacttgtaatcccatctatcattgaaaaaatcaaacagaatccaaaaaataatgtatcaataatcccaacaataagcggaattttattttcttttataacaatttttttcataaaatcacccgcattcattataactgaagcaaagaaaaaaagacatgtatttctacatatcttcataagcaatcgcaaattcttcatgactacatattttaaatataacctctccatctttataaaaacataaatcttcaaactcatcaccaaaaacttgataggttgaaaatagttttttcatctttgaagtcacaatatctaatgcttcaatcgaaaatgttaacatttcaaaaaccggtccaatcgttactggagtgattcttgtcaattttctttctatgaaataatctttaggaaaggataaacttttttgagtttgatgctcaaattcacaatattgacaattatcataaatatccatttcttgatttaataggtcatcaaaataatcagccgcttcatcttcattgacaaaatgaaataattgatttaattcatcacgatatccatcttgattattttgataatctaaaagacgtttttcatgagcttgaataatatatgttttcaattctaattgcatttgttcatattcttctaaactcatatattcttcataataccttacaattgaaaattgatcacttcttttttgatagtcttttaataaatcagcaagctcctgcttctttaaatttgtttcaatatatctttctttcatctttatcaccaaaataattttaacataaaagaaaaagtcattgtataattcgatgactttttgataatttaacatatttagttttgttcatttctatataaaacatcattattttatgtcgaattttgtatattagttacaatatgacataggaggtaagaaaaaatgaaatttttaaagaaagagaagtattttaaagaagtatcaaatgagtggttgttgttaaagaaattatcaatcaaatattcaacgtatacaaaatatgaaaatattatcaatacacatttgaatatatcttttgataatttattaatgagtgagattcatgaagattttgtgatgacatattttcatgaattgattgaaaagaatatttattctattagtacattaaaaagtattagatatgtactaaaatctattttagaatattctcaaatgaaatatcatacgatgaatattaattttaattttattaaattaggtaaatctaataatggttataaaccactaacaattgagcagaaagtatctttagaatcacattgctttcaacgttatgaaggcatatcattagttgttttattatcattatatggtggttttcgtttgggagaagttgctgggttaaagtgggaggacattgattttcacactggattaattagtgtaaatagaacaattgaaagattaaaagttactcaggagagtgaaacgaaaacacaattaatgattttagaacccaaaacaataacttcaaaaagaattgttcctattccaaaattcatcttagattatatcagaaaatattatgaattatttgatgttaaagatataactcactatatttataccaattcacataaaatatctgatccgcgtaatattcaatatcattttcaaaagttatgtcaattatatggtttccaaattaatttccatactttaagacatacatatgcaacaaactgtattatgaatgatattgatgttaaatcattatctgaaatgctcggacattctagtgtatcaattacattagagctttatgttcattcaactttagaatttaaaatcaatcaggtgaacaaattacaaaaaccttcttttatcacagagctatagattagatcataaaaagcaatcggaaactattttaaatagttccaattgcttttattattgtttcttttgaaaatattcactagcaagtatcccataaacacaagcatctacaataccttgattactatgcatagcttggcgtaatgtaccttcataagttaaaccacattttttcataactttaccagaattagaattatcaggttcatgttgagtttcaatacgattcactttcacttcttcgaataaatattgaatcactgccgcaaatgcttcacttgtaattccttgatgccaccactgacttccaatacaatagcctatatgaaccatgttggtttgttcattgatatcaacaacacttatacttccaataggttcattaatttcatcaagaacaatagcccattgataaaatgataaatcttgatatgattcaatccaatcatttaaaactttctttgtgacatcaacagattgatgaactggccatgttaaaaattttataaccttttcatcacttgtccaatttcgatatgccatgactgcatcattttcattaaactttcttaatgttaatcgttgagttttgatttcttttgtccctaaatgattcataatattccccctttaaatattttattaattataacaaaaaactttcatattaatcaaccttgcatttatcctcatcacaacaaataattttttctattagataataaataagaggaatcgcaatgattcctcccttattctttaccaaaaatacatttataacaattgtataacgaaagtttcctttcatcctattacaattattgagtatcttcaaacagaagtcatacttcaatacataagttaacaaatattatttaacaacaatattcacaatcttatttttaacaacaatcactttaacaatattcttaccatcagtatgtgttttcacattgtcttgagataaagctgtttgtttaacaacttcatcatcttcatccttgttaacagtaatcttagcacgaacttttccgttcacttgaacagccatttcaactgttgcttgttccaacatagcttcatcatatgtaggccatgtttcataagcaattgttgtatcatgtcctaataattgccacatttcctcacaaacatgaggagcaatacagcttaacattttaactaagttttcagcatatggacgatagacactcttagctttataagcttcattcacaaaaatcatcatttgtgaaattgctgtattaaatcctaaagtttcataatcatgagtgactttcttaaccgtttgatgatagataaaatctaatgaatgatcattttcatcacttaatttatcagattcaataaccaaacgataaacacgatccaaccattttctagcaccatcaacaccactttcactccatggtttgcttgcttctaatggtcccataaacatttcataaacacgtaatgtatctgctccataagcattaacaatatcatctggattaataacgtttcctttagatttactcatcttttcaccattgccacctaaaatcataccttgatgatataacttttgaaaaggttctggatgagataaatatcctttatcatacaaataacgattccacatacgtgaatacaataaatgtccaaccgcatgttcaggtccaccaacatataaatctactggtaaccagtgatccaataattttcgatcagcaatcgctttatcattatgtggatcaatatatcgcatatagtaccagctacttccagcacttcctggcattgtacttgtttcacgttttccttttttaccatcaatttcaacatttacccaatcagttgctttatcaagtggtgaagccccagtcttagatggtgaataatcttctaatggtggtaagattaatggcaattggtcatctgataaagccactgagctaccatcatcaaaattgatcacaggaattggttctccccaatatctttgtcttgcaaaaatccattctcttaaacgataattaattttttgttgaccacaatgatgttcttctaaccattttgtcattgctgcaattgcatcttctttgttcataccatttaagaagtctgaattaatatgcacaccatcttgtgtccatgcttcttttgtgacatcgccaccttctaagacaggaataatatcaattccaaatttcttagcaaacgcccagtcacgatcatcatgtgctggaacagccataattgccccagttccataaccagctaaaacataatcagaaatccaaattggaatttctttaccattgactggattgattgcataagccccagtgaaaacacctgttttttctttatttaattctgtacgttctaattctgattttgtcgcacaaactttcacatagtcatcaatcgcttgtttttgtgcttcagttgtaattttcgctactaaatcatgttctggagctaaaacacaataagttgctccaaataaagtatcacaacgtgtggtaaaaacagtaaatttttcatcatgtccagcaactttaaaatcaacatgagccccaattgattttccaatccagtttctttgaatttctttagttgattctggccaatcaatatcttctaacccagccaataacttttctgcataagcaggaatatcaataacccattgtttcatattctttctcacaacaggatatcctccacgttcactcttaccatcaatgatttcatcattggcaagaactgttcctaattcctcgcaccagttaactggaatatcaacatttctagctaaaccatcttcataaagttgtttaaaaatccattgtgtccatttgtaataatcaggatcacaagttgaaatacatttatcccaatcaaaagaaaaacctaacatctttaattgttttgtaaatgtttcaatattttctaaagtaaatccttctggatgattcccagttttaatagcatattgttcagcaggtaatccaaaagcatcaaatcccattggatgcaatacattatatccttgcattcttttcattcttgacataatatcagttgcagtataaccttctggatgtccaacatgtaacccttgtcctgatggatatgggaacatatctaaagcatagtattttggcttagagaaatcccaaacatcagtataaaatgtttgattttcatcccaatatttttgccacttcttttctatttgtttgtgatcaaacggcatctttcattcctccttaaaataaaaaaagtcctccatctaaggacgactttatcgcgttaccaccttagttcatacaatcattgtatgccctcaacactttaacgcagtgatacggtaaagactacttgattcacccttacatctccaaggcgagttcattgcttcctctacttgtttccaccagccacaagctctctaaaagattacagacaactactattccttttcattgatttttacttattcaacattatatcacatgatttaataatttcaactattaatctttttttaattaactccatctatttagcttgctattaacttcaacaattctaaatacattatttttattcttttaaagattcaactgtattgatcttcaaaacataaatcaatggtggaatttgactgatcaatacaaacaaatatgttacaccaaaaacaatcaacaataatcttatatcaaaagaaaagacaaactgatgatttaataaaacctctttaacaacttggttcatcatttcaatagcttcataatataacaaagtacatatcaactgagcaaataaaacaatttccaatgactcatataaaacaattttcataatatcaattggactagcaccaaaacatttcagaattgctaaatctttctttttttgaacaacatttaaaaacatcacctctccaattaaaaacaaagaagataaaatagctaagattgaaaaaatatataaaacaattctcacctgtttcatggtttgacttatattttgagttgtagaagcaccaacttctttaaattgataagtgggataagttttttgaagatcatctaaaacagtttttctttctttatttttatcaacatatataattcccaaacttgctgatggattctccggaaactgataaacttcttttaaaagataataagaagcatgattttgttgatagaaagtatctaatgaagttgtttgtgtcgtgattcctaccacatgaaaagcaatgggtttaacttctaaaccatgttgataataaacataaactgctttatcaattaataaagaaatatcttcattttgacaaagatgttgagctgttgatagtgatactaaaatttcatgttgattttgcggaaatcttcctaattttaatgataaatcctcataaggagatgtttcatcaccgataaaaagagttgttgattcttggtagcgttcttttataaaactcattcctaaacattcataatcatctaaatacatttcggctttaataatatctggatgagcttgtatttgattgagtaattcaatagtcaaagattgatgatgcattgattgaaaactaatgctggaagcaggaaataacgaatgaatatattgatgaatttgattttctaaattttgacttaatgtcaatgtaaaaacaatacataacaaagaaagggttaaaccaaaaaccagttgtaaagaacgtttcttatgtgataaaaatgattcaattgataaacgaagatgtggaaaaaaaattctcttagttttctttttcatttgattttgatgcactgactgtcgatagacacgatgagctatgatttgtccatctttcatttcatagatttcatcactatacttttcaactaatttttgatcatgtgataccaaaataaccaatcgttgttttgcttcttcttttaataactccataatttcctttgcatgaataggatctaaagaacctgtcggttcatcacataataaaatatcacttttatgataacgtgttcttaaatatgcaatgcgttgtctttgtcctaatgataaagaggacatactggcattttcaaaagcttgcatatctaaaagaatctgttgtttttcttgaggatggaaaaattgtggtaaagcgatattttgtttcactgacaaccacataattaaatgaaattgttgaaagataaaactcacatgttgacgacgatattttgttaaatgctttttcacgctttttccctgccataaaagatcacctaaaaaatcttgatcaatacctccaataatatgtaacagcgtacttttcccacatcccgaaggtccaacaatcgaaaccattccacaacttggaaaagacatattaatatcttgtaacactttatgataatcatatcttttttgaatattctttaattctaacatccttattcctcccttaaaacatcaatcatattgatactcatcatctttcttgttggtaataatgcccctaacatggtcatcaacatataacaaataaaaataaaaccatataaatcatattgactcaataatatggggtgtaaacttaaaagaatcccaaaatgttcttttaataaataaacattattgcaataaaaatataaaaatgctgataataaacaaccacccgttgccatcatgatacctaaactcaaggcttcaataattgataaaacaaacaacctttttcttttcatacctaaagataataaataagcgacatcatgagttctttcataataaattgttgattcaacaatcccaattaaaagcaaggaaacaaaaaaactgattcctataaaaacataggcaatcaatcttgctagagaaagaatggattgataattttcaaccctttcaattacatcactataaacaaaataatcctgagataaacttttatacagcatttgatgagattgcgccttagcttctacacataaagttttcatatctttaaaagcagataattcgttttgtaataatggtgaacaataaatttcttcttgggtaaagaaatgttcttctaaaacacctacaacctgcatttctatttttgtatcagtaagacaagttaatgtttgaggctgttttaatgtttgatataaaggtaaactcaaaacaatttcatgactattttggggtaatcgtccttttgataattgaatatgagatgtttgtattggcaaaaaggaaatgaaacatgttatatctttattttgataagaccattgtaattgttccaatgaataatcataagtgacattctttatctgaggatgagttatcatttcttcaaaagtactgccatcttttttctcaatcgtcatcatgttgacttggactgaacttttctcactttcacttattgcatcaaaaacaccattcattgctgtaacaatcaaaaagaatgccacaataacaatccattgaaataaaaaaagaaacagtagtttgtttctttgataaagtaattgtttaaaagaataaaaaaacatggaatatgtcttgagttgagggtgagtcgtttgaataattgatgtttttttaagtcgaccttttaattttccattttctaaagtcaaaacactatcacaatattgtttcaataacaaaggatcatgtgaaacaataatcactaatgattttaatgatagtttttttaattcttgcataacgatttgagcttgttgactatgcaaggctcctgttggttcatcacataaaataattggtgattgtttgagcattgcttttgcaatcgaggcacgttttaattgtcctcctgataattgatgaggataacgttttaataaatcttgaatagaaagttgagttgtgattttttgtaaaatagctggtgaataatcaatctgactgacttgtgatgcaagtgtaatattttcttttatcgtcaaagcagaaataaaatccttattttgcatcatataagaaatattttgacttataaattcacttctatccatgactttttcgccattataaaaaatttcacctgcaaaatcatcatccaacattccaataatataaagtaacgtacttttcccacatccacttgttccttgaattcctaccgttccacaatcaggtaacactaaagaaacatcatcaatgataagatgttcctcaaatctttttgaaatatgttttaactctaacattgtttcctcctttatgctataatcatttcggtgataaaaatgaacaaattcccttattcaaatgataacaagcgttatcatacatataactattatttaaaaaataaatatcaacaaaaaatagccaaagtctctttaaacgctggctttacttgtcctaatcgtgatggaaccaaaggaaaaggtggatgtattttttgttcagatagtggttctggtgattttgctggaaatgtctatgattctttacaaaaacaatttcaagatgtatctacaatgatgagaaaaaaatggcctgattgtaaattcattgcatattttcaagctaataccaatacctatggaacattagatagattaaaagcaacctttgaaccgtttttagattatcctgatgtggttggaattgctattgcaacacgtcctgattgtttaagtgaggagatttgtgattatctttacgaactatcacaaaaatgtgatctctatattgaattaggtctacaaaccattcatgattcaacagctcaactgattaatcgtggacacgattatcaaacatttttaaaagggctagagcgtttaagaaaacgtcatcttgatgtctgtgtccatattatcaatggtctcccttatgaaacctatgatatgatgattgaaactgcaaaagtagttggcaagctagacattcaaggtcttaagattcacaatctctttatgttaaaagatactgctttacataaaatgtatttgcaaaagccttttccattactttctagagaggactatataaaacttgttgttgaacaattaacttatattcctgattctgttgtgattgaacgtctaactggtgatgccccattaaaagatcttgttgaaccattatggtctattaaaaaagtaacgattttaaatgatattgataaattaatgaaagaaaaagatctttatcaaggttctttggtataataaaaagcccaagcttgggctttttatgttattcagtttcaattaagccataatttccatcatgtcttttataaacaacactaattaaatttgtttcagtgtccttataaacaaagaatgaatgtccaattaattccatttgcataatagcttcttccatatccataggttttggactaattgtctttgttttgacgagaacatcttcctcctctgtttctaatggttcaatagaagcaatgttcaatgcgagtttattatctttagattttctgtttaatctcgtcttgtactttctaatttgcccttctaatttgtcgattactaaatcgattgcattataaagatcttcatccatttcttcagctcttaataatacatattctgttggaatagtcacttcgattttttgaccaactggatacgttctaattaaaactttcgcttcaacattatcactcatgataaagtatttgtctaacatacttaatttcttgttgacttttgcttgaatcccttcagttagctcaatgttttttcctctaataatgactttcataaatattcctcctttgataattatattatacaataaattaataaaaattacactcctatccttaaaaaaagtaaaaaagccccgataggagcttacaaatattttttcaaatcttcaactttatctaaattttcccaaggcaaatttaaatcaccacgtccaaaatgtccataaacagctgtttttgaatataatggctgaagcaattgtaaagtatcaataattccttgaggtgttaaattaaactcagttttaatcgcttttaagataacatctttatcaactttttcactaccatatgtttcaataaagacacttgttggttctttaaccccaattgcataagataattgaatctcaattttatcacaaagtccagcagcaacaatgttcttagccatgtatcttgccatataagctgcacttctatccaccttagaaggatcttttcctgagaatgctcctccaccatgtctagctgttccaccatatgtatcaacaataatcttacgtccagttaacccagtatcaccatgaggtccaccaattacaaaacgtccagttggattaatataaactttgtaatctgtattcatgtcatattttttaacaacttctttcataatgacattttgaatataatctttaaattctgtttcattaaaatctggatcatgttgaatcgacattaagatcgtatcaatcttaggatgagtaggatcactataatcaactgtcacttgtgatttcatatcaggacgtgcccatttaaattcaccagcatgtcttttttctgtggcataacgtaccaaatgatgagcaatagaaactggtaaaggcatatatccttctgtttcattacaagcataaccaaacataataccttggtctcctgctccaccaacttcaacatttgttccaagagcaatatcagctgattgggtatccatcacaactttaacttcacaatgatcggcatcaattcctaaatcatcacttgtataaccaatttttcttaaaacatctcttgcaatactttcataatcaactttggcattagttgtgatttcaccaccaatcatcaataaatttgttgttgtgaaacattcacaagccactcttgaatgtggatcttgtccaatacatgcatccaagatagcatcactaatttgatcacagactttgtctggatgtccttctgaaactgattcagatgtaaataaaatcttttccattttttctttcctcccgcatttcaataaaaaaagctttcaagaggaaagcttttctttcctcttattgttcaagtaaacttgctaggtaaaggcaccttcttttctaagggttgccaccacttcatcgatcctcatctcgtggttctgaataagagcttctattattgatataattttgttagatcttcacgacttaaggatgtcatggcttctataagttccatatctattcctaagtcataaagaatggcagctatttttaactgctcctgctttcttgtattcataatatcaccactcttagtttaacctaatcgtcagacattattctacaaatcaagactttgttcattatatgctaatcatatctataaatcaagagatattttcacatactatgattataacacatttttcattgtttttttctcaaatttttctcaatttttattttcttttaataaatccctaatttctattaaaagttcttctgttgttggtcctttttctttgatttcttcaacatcttctttttgacgaagtgaagataatttcatcatgatttttaacataacaaagattaccaatgcaataattaaaaaatcaatgatattttgtaaaaaattaccatacattaaggcaatcccttcacttccattcactggttcttttaaaaccaatgaaagctttgtgaaatcagccgcaccagttaataatgtaatcactggcataataatatcattaacaagtgatgaaacaattttaccaaaagctccaccaatgataaccccaacggccatatctagcacatttccacgcatggcaaattctttaaactcagcaataaattttttcattaaatagcctgtacttccaaaacaccaggaacttcttcaatcaggatttgttcaacaccatcttttaaagttgcatcaagcattgtacaaccagcacaagctccatgcatttgaacataaacaataccatcttcaaatttgatgaattcaatatctccaccatctctttgtaaatatggtcttagtttatgaatgactttcttaatttcttcttcttgattcattcttcttcctcctaacgtcctccatattataccataatttttaaaatataaaagtgacataacctattttcgctttcatgtagaacccttttgtgatataatctcattgattggagggctgttaatggaatatcgcgtcaaaactggtgatattattgatgtgaccattactggaattcaaccttatggtgcatttgcctctttacccgatcatacttctggtttaatacacatttcagaaatatctgataagtttgtaagaagtgttgaaagctttgtccatgttggtgaagttattcgtgtcaaagttattgatatagatgaagaaagtcatcaagccaagctttctttaaaagctgtacatacagcaaaaagaaagtataagcgagcttataaaaaccaaagggaaaagatacaagagacacctttaggatttaatccattgaaagaaaaattgcctgagtggattgctcaaggcatcaaaaaggaggaagaatgatgattaaagttgatttatcacaagctaaattagctgaaagtatggatgcatatacaaagcaagttgcttctattcatgatatgatccataacaaaactggtaaaggaaatgattttttaggatgggtagacttacctgttgcttatgataaagaagaagtcaaagcaattaaagaaaaagctgcacaattaaaagatgaaattgatgttttattagtatgtggtatcgggggttcttatttaggagcaagagctgctattgaagcattaaatggtttattccctacaaatgatgtacaaatcatctatgttggaaatactttctcatctaattacttatctcaagttaaagaatatgttaaagataaagaatttgcaatcaatgttatttctaaatcaggaacaactactgaaacatcaattgcatttagaatctttaaagatttacttgaatctactaaaggaaaagaagttgctagaagaagaattgtcgcaactactgataaagaaaaaggtgctttaaaaactttagcaactaatgaaggatatacaacattcgttgtacctgatgatgttggtggacgttattcagtattaacagcagttggtttattcccaatcgctatggcaggaattgatgttgaagctatgttaaaaggtgcagctgatgcaagagaagaatatagtaatcctgatttagctaaaaatgcagcttatcaatatggtgtagctagacaaatgttatcaaaacaaggatatcctgctgaaatgtttgtcacttatgaattacaacttgctatgactgcagaatggtggaaacaattatttggtgaatctgaaggtaaagaaggaaaaggtatcttaccaacaagtgcaactttctctacagatttacactcacttggacaatttatccaagaaggaacaaaagttttatatgaaacagttttaaaaattgaaaaaccaatttctgatttagaaattcctagtgatgctgataatttagataatttaaattacttagctggaaaaactgttgattatgtaaataaaaaagcttgtgaaggaacaattgatgcccatgttaatactggtaatgttcctaatatccaaatcacacttgatgaattaactccatattcatttggatatatggtttatttctttgaaaaagcatgtgctatgtcagtatatttattagatgtcaatccatttaatcaacctggtgtagaagtttacaagaaaaacatgtttaaattattaggaaaacctggtgtttaagaagtagagaaatctacttcttttatttttttaaaattttttcttgacggaaaatatctcctatggtattatatgtaagcactaagaaatacggaggtttagctcagttgggagagcatctgccttacaagcagagggtcagcggttcgagcccgttaacctccaccattgccggcttagctcaactggtagagcaactgacttgtaatcagtaggttgagggttcaagtcctttagccggcaccatattgatggggaggtagcgaagtggctaaacgcggctgactgtaactcagttcctttcggttcggtggttcgaatccgcccctccccaccatcttgttgggatatagccaagcggtaaggcaacagactttgactctgtcatttccctggttcgaatccaggtatcccagccaattatttgacccgctagctcagtcggtagagcatctgacttttaatcagagggtcaggcgttcgagtcgcctgcgggtcaccatcttaatatgcggatgtagttcaatggtagaacttcagccttccaagctgactacgtgggttcgattcccatcatccgctccatttaagattttatattccctatgcgggtgtagttcaatggtagaacttcagccttccaagctgactacgtgggttcgattcccatcacccgctccattaaaattttatatttcttatgcggatgtagttcaatggtagaacttcagccttccaagctgactacgtgggttcgattcccatcatccgctccattagaaataatacttcctataaattaggaattttttttatgttaaaaccctgtttatttttaaaacagggttttagcgtattatctttttaaaaaacaaaatataaattaataacccatcaattataaaatcgtatatccttaatccatcaaaaagaataagacttgataaaatggatatcaatacaattccaatacggatgatataagataaaagacctttttcttttgtcatccaagtaaaataggccaatattggagaacacaatgcaaataatgtccatgccataataaaagtcttgctataaacgccttggttaaaataagcaacactataatatgtgcctagcattcctaaacaaaatggtaaaatattaatcattgcttgtttctttgtatgactataaatagagataagaacaccaaataatatccatatagccatttgtgaaaaaatatttcctaaattttgagtatagatatccaataatcttgatagtattcctaaaaggaatccaattataaataaactgattggattaatgatatatttcttcatttcatcctcctaaatgaacaatcatattcctatttaaaacattcttttgatataaaaagctaacatataaggtaataaatcattatatgaagatagtggattatttaacagttctttaatctttgttaaacgataattaattgtattacgatgagtatataaatgttttgccatcatttgaggacttccattatactccaaataataataaagtgttttttctaactcaccatgatgtttttcatcataagatattaaaggatctaataaacgatgatacatatcttttaaaatttgttcatcttcaatagaagaaagaatttgataaacccccatatctctaaaatgtagaatggcctgttgaaaatgagttgctaaagttgtcgcacttaaagcgcgtttataacttaaaataatatttctaaaatctttaaccattgttccaacaccaatatgaatttgatatttgttcatacgttttttagcacgctgacacatacttttaataatttcatcaaattcactttcagctaaattattgactaccaatacaaaacgtccatcataccaaaagaaactataagggcattcaatcttttcaaaatacaattcaatttgaaaagccatacgtcgtctttcaatcgtatcccattgatcagaatcctcaatatgaatagataatacttgaaaggtaccatcaacatcaaatgtacttgttaatgctaatcgagattcttcaatatcctgagcattcataaaaacctttttaaaataagttgcaacttgtcgatcttctttttctgaataaagacaacgcatactaaaatccttaattaaatctgccaaatgaactttccatggtgttgttaataatggaaaatcttgttcatcacaataatcaataacatcacttggaatatcaaaaatatatttacctgtattaataatcaaaccaacactatgatatttgacaagatattgaaccaactctaatagatctcctgcttcttgaaaaccaagtcctgttgtgacaaccaattcttttccccataattgtctaataatcgttgtatcttctatcaaatgaacccaactaatcgcattagcacatccctttttaccagctaataattttaattgatattgagtttgtgtttggaccaaagcatcttcaattgtaaatcccataacaatcacttccccttctttttttattataacactttttgtgctctgcgcacaaaataatggggttatctttatattttgagaccctttttttattttgattatgttatataatgtaattgtattaaaaaggaaacaatatttcaaaggaggaatgactatgtttatctcatctgattattatgcattagctagcgaacgcaattattgcccatcttgggtacaaagtgaacgttatttcaattgtgctcacttctcaaagttattatcttttttctggaataaataatatatataataatatttaactcccctcaaaaaaggaaaggtatcacatcccatgataccttttttacttatcttttaatttttcataaagcgcttttgtttgacttgctgttttatcattaacaacaacaattccatcttttgtttccataacaacataatctttgcagcttgtataacaatataataaatatctaccaaacttatcattttgaaaacgtcctgcattaatgaccatattattaatccccatttttttcttaccgatatctaaattttcaacataactgactttttcaatatcttgataaagaacttcagtcgttctcgataaagttgccttgaaaacaactgattgatctaaaaacttcacattgatattccctataaacatcatgattcctactccaatagaaatcaatatacctattattgcaaaataaacttgaccgtttttataccaaggggttttggcaacttctttttgatattcctcacgataacaatgtccactccctacaaacataacaaccagtgctagtgcgattgttataagcataatgacgactccgatcattttaaaaaatgctgtagcaagcaaaccaaaagctataagcatcatccctattcccattacacgacataatttcttttcatcatagcgtgctttttcgctttcacttgcagtattataacccgcgattaaaaaaccaccttttcccattaataagaaaatagccataatcccaaaaataagacttaaccctattatcataatcgttttcctctctatctataaattccattttatttcttcaatattcttaaaaatattttcatcaacaaattgcggcaatctgggatgacaacagtgatattgattatcattctctcctatcgcaaaaatcactctttgtttagcattttttccaaataaaaaccatttcacgtttttatttttcttatcaatatacttcataacatcattcataacttctttccataattgtgtatgagaatctggctgatctggttcgacagttaatgtcgcatttaagaatagcacaccactttgttctcgtttatcaaaccattcaggaggttcactcatttggaaatcaccattatcaatatcattacggatttctgctattgttttcttttgacctgtttcattaaagacaatagcttttaatatatttatcaatgatgcttgtttaaatttttgttgccagcttttaacattttttacttcaaaacttcttcctgtagcaacaccttcaatttttccatcttcatttgtataccatgaaggatagggttccatgccaagaataatacatttgatattttgaagatcaagcgaaagaaaacgcataatcttatcttttttaggaaaatacgcataaccacaatcgtgtaatggcatcctatccaatgttttttctatgacatttaatttttctataaaatcatcactcaataattctttccatgaatcatcaacataattaggcaatagtgtcatcttatttcatcctccatttttacataatacttccattataacgatattgaccataaatcaaaatacctatccctaaaacagttcctaaaagaatcaaaatagcagagaacttgccactcaagatatgaagcaaaacaacaagaaaataatcaacccccataacaaaaagtcctaatcccactacttgtgtataagctttcttttgtgaatcatttactttttgatagtgataatcatgcattatctttatattatgctttacaatcaactgataagcatagaacaacagcaataaccctattgctaaaaatataacattttccatagtctcaccttttatagtcattaattttttaaatagctttcaaaacaacttctaatattaaacaaagcacaacatcagcaatcatcattcccattaacataactgatgagaaatgaaaatatgcatgaaacaatattatcattccaacaaaaataactgctccactttctaaacggacatgttttttgatatccttaacaccattataatttttaatcagaggaattttcccttgaataaaacaataaagtcccaaagcaatagataaaatacctaaaatgatttctaccatatatactccttctatttcatataaatgccaaccatttgaccagattcattaaaactaattgtataagtcacacttcttttttcatataacgcaacaacctcactcgccgctaacaactcacctttttgcttagcttcaacagattgttcactcgttattttttcaaaattcccaagttcccctaaatcatttttagcctttaaaatatcatctaatcgatctcgtaaatttggacttaacatttgatgaagcgaatcataatcattttgattaagataaccaattgcttctacattccattgatgtacttcactttcttgatataatcctgatgttcctaatggattgatatcaggtatcagtgattgaatatacaagacaatagcaataataacagcaaccacgccaataataatacctataatcaatttcttatgtgactttttgtaaacaactcctaaattatcattaaattcttgtgctaattcttcaggtgtccccattcttttcataatatcttcaaatgtttcaccatttttcaatgccatttcaatatcattattcaaatcaactttgattttttctttttctttctttgtacatcctaattttttcataactaatttaatatattgttctttattcatcatcattatcccccaatatttgatttacattttttgaaaaatcatgccataaactccgcaattcaattaaagtcttttgaccatcctcagtgattttataatactttcttgaaatttctttatccttttgttcactccattcactcttaaccaatccatcatcttctaaacgatatagaattggataaagcgttccttcacgcatttcaaacatgccttgacttaattctttcatagtcataatcaattgataaccatacattttttcttttgataaaagctgtaatactataatttctaaaacacccttttttaattgtctttcatatttcacattcatagcatcatctcttttctatttagtattactaaatatattctaataccaaatataaaaatagtcaattattacgaataaaagttaatactaaagtcataaagaaagtcaatactataagcgggtgatgaaaatgagtcaaaagaaatttacttttaacgatgaagatgaagatacaaatgatatctatcaatcacatatagataaatatgatagttattatcaacaaacaccaaaaacaaaacaaataaaccaaccacataaaaaagcaactgttcctacaacaaaacagccccttccacaaaagaaaaaagtccctaaacatgatgattctcatgaattagaagatcaaaaagtagttcagcattataagaaaccaaaaaccaaagtcaaaaagaaagtaaagaaaaagacaaagaataaagtcaaaacaaaagttataaaagaaaaaagaaaacgttcttggttttctacattctttctatttttattaagtttattaatcattgcgggtgtttgttttggtggatatgtggcttatcactattatttaaagcaacaaaatcaaattgaagaattacaacaacaattacaggaatcaaaacaagatcagcaacaagattcttcaactcagcaaactgatgatcaagaatcaaattctaccgatcaagaagataaacctcttgatgacaataataatcaaacaatacctcaggaataaaagaatcaaatgattctttttttattcccaattgaattcatcatcatatgataaataagaggtggttattttgcatttattatcagttgtttttttagttgtatcagctaatattgatagtcttttaattagcttatcttatcgcctaagaaatattcatatttcttttcaaaataatttaataataacttttctaacaactttaggaacttatttatcaatggtattaggaagttattgtcaacatttattttctttaaaaatagctaatgaaataggcgcatttctattaatattaataggttttatcatgatgattcaatctcatcatgaagaacatgcttatttcatagcaaccgatttgtccttaaaacaagcattatttcttggtttaactttatctattaataatctaggattgagtttttctggtagtttaacaggtttaccttgtttatttacttgtttgatgacttttattgtttctagttgttttatctttatttctcaaatgattggccaattatctttatttcattgtcttgaccattatgcaccttttttaacaagtttactgattttattcattggactctatgaatttttcttctaaaagaaaaaaactgcttatgcagctttttgacgaatatatgggttatgataaaaagaataagccaattgtagacacatacagcaccaaataaccggttcacatataataaccccaaaatatcctaaaataggaataaacaaagcaacaaagatcactttacctaaacattcaataacactagatacaagcggaataatcttcattcctaatccttgtaaagaatttctcaaattcaataaaataccaagtacagcataaaatggtgcattgatacgtagataaagtgaagcattatctataactgttggttcagttgaaccagaaataaattgtaccaatattggagctaggaagaataatataaccgtaataatgataccccatccacaagcaatcaaatttcctaatttaaccccgtctaaaatacgttgtttttgatttgcccctttattttgcgaaacaaatgttgataaagcaagacctacagtccctgctggcatcatacaaaatgaattcaatttacgagctgtcccatgtccagcaataatcaaatagccaaatccattgattgaactttgtaaaataaccgttcctgctgaaacaatagacatcataaatcccattgaaaatccttgtcctaataattccttatagagttcttgatcaaaagcaaaatgttgtttttgaggaattaagattggtgttttttggtaaatataaatcatgcataagaaaactgaaataccttgagcaataacagttgcgatagctgcaccttgaactcccatttgaaattgcgtaataaatagtaaatccaaaatcacattaatgattgatgagataattaagaaaacaaggggcataacactattacctatagctcttaataatcctgcacaaaggttataagcaaacataacaccaacaaaaattgtgacaactgaaatataagaataagcttcatcaataatattagctggagtatgtaataaagtcagcaaaggatataaaaagataacggaaataagcatgataacgagggttaaaccaatcccaataacaattgaaccagctactgattttttaatcaattgttcatcatgtgccccataacttcttgctgtgacaattgagagtccattaccaactcctaaagcaaatcctatcaacaattcataaacagccccacatgcactaatggcagctaatgatgtatctcctaaaaaattacctacaatcattgtatccattgtattataaagttgttgaaagatatttgcgattaatattggtaaagcaaatatcaataaagcttttaagatattgtcttttaataaatcaacttttaagtgaaacataacatccttcctttcttttgatatcttactccaatttcatattttttcaatttattttcagattttgacaaataaaaacgaggattccctcgttttaacgttttgatagttcttcttgtttttgaattaaagctgccaacgcttcatttaaatcagtcatatcatagactgtcttttccattggacacatacctgtatgctcacgattaacaatataatcagctaatttttcataatcataatcaatcttgtaagcatctaagatttcccgtgctttacgacttaatacatacgcataaatatattgaacttgcgataatgcaagtaacatagctgccgcctttcctataacacgatcaacgacaattgcatctttaaagaataattgattttctttcataggattgattaatggtgcaattccttttaattgagatgtataaatcgtatcttgaatttgtgctaccaaagttaaatcttcattgttaagcttttcttgtaatgacttcaggttcattaaaataacctcctctatcaataatcgtgacaattgtcggtacaaataataactgaatcacaattcctggcacgcctgtcatagtcgccattataactgcctggattccgcctaaaggaatctggaaaagataagttccaatcgaaatgaccaatccatataccaatcttcctgctaacatagaaattactaaagcagataatgaccccaatttctttttagaaaaatggaattgatgaaataataacccactcatgactccataagttgcaagttcgctcatcataaaaataactctatcagccgaaggcattccagtgactacgaaacttgttaatggagcaaagattcctaaaaataatccataaataggccctaacaacattcctccaataaaaactgggatatgcattggtaaaaagactgctccagcttgttgcagaccaatgaaatgaaagatctgtggcaacaataaggatagagctaaacacatcgctccaaatgtcattttttttgttttcatataaaacctcctaataaccaaatagcttttgtgccattttcattttttcaataatattaacttcaaaaggacaacgtggcatacacagttgacactctatgcattcactcgcatgatgtgataacatagcgtaatgttcacgaactgtttcaggaacttccccttgatgacataaatcagtaaacttatgaatatcggcaattggaatttgtttgctgcaaggtgcacaatgtccacaataaacacaatgaccaataaaactatgtttagggacatgactcaatacttcggcaaaatcttttgcttgaaaatcagctttacaataatcaatagcttccttcatttcttctatactatgacttcccgccatgacagaaaccactcctggtcttgtcaaacaataatgaatacattgtaatggggtcatctttactccaaatggtgagagattctcatctaataaatcgccaccaccaaaagctttcataacagttaaagcaatatgatgactttcacaatattcatataaatgttgacgttctggtgcaatttgaaataaaggtttttcatagtttttatcatcccataaatcatctacattttcacttggtggtaacatatcataacaaggattgattgaaaacataatcacatcaaccaaaccactttgcgccgctaacattgcgattaaaggattatgggaactgattccaatcgatttaataattccttgagcctttaatgctttagcatattccataatttctccatgaaaaacttcatcaaaatctttctttgcatcaatataatgaatcattccaatatcaatataatccgtcccaagtcgttttaaaagatcttcaaaaccagctttaacttcatccatctttcttgttctttcatattgaccatttttccatgttgtacataaatgaccttgaataatccaatcctctcgatgattttgaatagctttaccaaaagcgctacgtccttgaggatttgatgaaaagaaatcaacaaaattaattccttcttgatgagcataatcaaccattgctcgaacatcctcatcgcttttattcataaatccttcacaccctagtgcaacaacactaacttgtaaagatgtttttcctaattgacgatattccataaactctcctttattttaaagacgtttgataatcttcataattcttcaataaaagttctggtgtatttaaaccgtatggacaacggctgacacactgatgacaatgaatacaactttctatttttttcatttctgcctgccatttttctgataaccatccacttgcaggcgcacgtcttaacatcaaagacatacgagcacattgattaatcacaataccttgaggacaaggcatacaatagccacagccacgacagaattgtccagataactcttgacgatcatgttcgataatcgcttgaatctccttagttaaggctggtggacactcttgataacttaaaaattcatctagctcactttccttttggattccccatataggtaaagcatgtgggaattgattaagataagcatatgcaatatcactacgcgtaatcaagccacctgataaagctttcatacaaataaaaccaacatcatgttcttgacataagcgcacaagttcttcttcagcatcgctagctaaataactaaacggaaactgcaaagtatcatataagcctgattcaatagcttccttagcaactttccaaccatgatttgttaaaccaataaaacgaatctttccttgtcttttagcttcttccattgcttcataaagacctgttccatcatttggcttaggacaaaatgagggattatgaaattgataaatatcaatataatcggtctttaacatctttaaactcatctctaaatcctgccaaaaatcttcaactgttgttgccattgtttttgttgctataaaaatattttctctcacatcacttaaggctaagccaatcttttcttcgctatcactataagctctcgctgaatcaaaaaattgaatgccattttcatatgcttttcttaaaatgacttgtgcatcttcttttgaaacacgttggactggtaaagccccaaaaccatttttattaacaactatatttgttcttcctaatcttactttttccatgattttatccccctgatattatcataacacttcaagttgactctaggtcaagccttttttcttatttttattgaatgactttttcaataattgcttcaaaatgacaggttgcaaaatctaaagcatctatcatcttgattttatctccatacttttgaaaatatgtatcaaacatataagccatttgtggagctaataaaatcagatcataatgatcaatcaaacgttcaatctcatgataatttctagcttcaataaaaactcctaatttcttttgatcaactaataattgtaatgcattcgcaaagtattcagttgttaaaccactaccagctaataagattttacaaacatgttttttatcttgttgaacaggtcgtagtaattcgggatgttttaaatagtgaaaaaattgatgaaattgttgaagggctgtttttatatcatataattcaaaacataaatcaaataaatgatgattggtatttttatctttaatcattaattctaccattttattttcatgaaaataaataacaccataaatcgaatcatgtgttaaacaaagcttacaagagtttgtacaaacgtgaacacctttatgtaattgaacccaataatacattaacggtgataataaatcctgataaaattcattcatatgacaacctcctttacactgtcatatcatactccatagagtgtactttaagtcaagttttttcaaaacgtgaaaaaagtagatatttgtctatctactcaatattcacctgaatgatttcatataatgataaatctaattgatcttgaaaatatatttttaagttatcatgattttgaatgagattttctttttgttttttacttaatgtctttaaacgatattccatttttgatgctatggagtgattttgacaagccatacaaaattctatgctttcaacagcatgggctttggtatattttgctcctttatttgcttttgaaatgtgttcatgaaaacgtcttttgatatctgttgtaattccaatataaaggctattatcctgacatcttaatatatagatgtaatacatatagaaaataacctaccaatgtaggttatttcacttgcataatgaagaagtagaacatattcttacctctaggtatttcataatgttcaattaatgtcagatagccttcttgtaatcttaaattctttcttactaaagatatttcacttgtatagataaaaacatatcctcctggtttaacaagtctacgaatccgttcaaagaaacggtcatagatatcttttaattgttttgcatcattgacttgtgaaagtgtaggcatatcagttatgatttcatcaaacatttcattatttacaaagcgcaaagcatctttatgaacataatagatattttgtccagccaatttcgtattttttctagccgcctcaatccctagtccataaatatcaatacccatcgcaaacttagatggtaatgcaaagtttctttcaatcaaaagtgttccacagccaacaaaaggatccaatacttttccattttctttcatatatggtttagcaagttctactaaagttgctgcaacataaggctgcaaagaagtagcaatgacttccttacgataattaaatcttggatttttaagatgcgttaatcttaaataagcattaaccttacctcttttgatttctcttaatataatttcaatatcataattttctgttgtattcaataagatttctggatacatttcaaaaagcttttctgatactttcttaattaatgaagcattcttttctcttaaaccatcaacgactctaaaatagaatagcgaatgatcatcatataatcgatctaaaacatctgctaaattagaacgttttaatcccgctacaattgcatctaatgatatatccattcctgaagcactttgtaatggaataatcatatctttataagcacgaatattttgtaaatcatatagtgaatcacttctgactaataccccttgagtcacaggtttatattttaagtgtaaaactgaatcaaataaaacaaattgatagtatggaagcgttgttaaaatcacatcaactggatcatgttttaatttaataatcttctttttatgtgtttgattctttaatattaatggatttaaaatctttaactgcgcttgaatatgttttgtaggaacactatcaaaatgaattaattgactttgaattaattttaactcttgaatatgacgatgacaatcttgcatactgattccctttaaataagcatctttgacgtaatctgtcttttcttgtcgatatgcatccaataagacccctactgtatcttgatagtatcctaataaaattgcactgttctttcttatctttggatcatcattttttaataggtcaattaacttttctttcaattcttggtcattttttataagtgaatcatttcccgctaatgatttcaattcaatcaatgattccctaatctgttcattattttttatattacttacacaatccatacatatttccctttcaattatttactatatattataccatattttcgccatttatccaacttattttaggaagtcgtacataaaatgatacaattttcatcatttcttcatacatttgtcgttcttcatctaaataaagatagtaattttcaacatcacttgaagaaagctttgaacaaaggatttcatcaaagaaatgagaaggatataaaactcttgcataaagataaatcatctcataaacatcataatattgattttctaatagtttttgaatatcttcataacttaataagtgacttcttaataaataaacaatctgacgaggacgggttgaaatacaatacatacagggatttaataattcatagacatgattatcaatggtatgaattaaagccaaagaaagcgaaagcgtggctttagaatcaatacttagaatttcatttaaaacattaatactgttttcagcaatgccacagtaataataaataagggatataatatcttggtcatgtttaaagctataagcatattcgcggactttttctctgacacaatcaattttttgtatccatctttctttgatatctatgacttttattttaggcaagggcatgggtaataagatattttgcagataaaggggataatcgaaggaagctgattgataaatgaataaagcacagttttgggagatgatatcctgattatgatttttaaccaattgaaaaccggttaaatgacattgatgcataagatagcgataataatgataaacatttaaaaattcttggacattttttaaataagcaaaataataaagttttccttgatattgaaaataaccattttcattgatatcaacgtcgataccataatacatttttaaaatatgagacatgatcattcttctttctgatgagaataaacaagtggaacttgtccttgaaatatttctaataaaacaggaatcttaatgttatgggtgtgatattgttcaaaaaaaggatagaccattgtgatattcatatgcacttcaatactcaattcaaccatgacatgattgaccccatagttttctacatttttaacaattgaacttcctacactagacaaatgtttataacggattggaatcgttggtgaaaataatgataaagctggaagatttaaaagcgttgctataggaatacgggaaatgattccatttcgacttacttcttgtaatcttctttgataataggtatcatcatcggctagaaatgttccttcttctaaagaagcatatgtctgttcaatatccatgactattgctgttgcaagttcattgaccttcaccatatcaaaatctaataattcaatttcgttatcttcacctcgttcaatgattactaactgatcatattgggaatcacttgtaaaataacaatgtgaaataatcaactgattaaatctttgaatttccatttttccatattcttttaaactaggtatcatttttaaataaataccacccatacatagtgatatgacaatcaccaacaccaaaagtgttattaaacattttttcatcctatttcaccaaattattatatgattttatcttcaacaaaagacctttatttctaatcaaaaaaagataatcctttttttgattatcttttatatctgtttgcttcagttatgatttcatctaaagcaatatcaaatttatttatatcaatctctttaactttttgaaattcaaatgctatgccaattttataataatgatgttttaaagcaaaatatttatcataaaaaccttttccataccctacccgatataatttatcatcaaaggcaaccatgggaacaagcatacaatcaatatcttgaggtaaaaccaaatcagaaacagttggttctaagacatgaaaataaccttcttttaaatcatcaagcgaatgaatttcatagaaattcatcatctcaccttcaactttaggaacacatactcttttggttttcaacaattcttgaattatttttaatgtactcacttcatgtacaagtgagacataacaggcaatcattgaagcagattggatttgctgatgagataatacttgttcgaagatttgctgattatataaagaaaacgtctcggttttcatctgaagacgttttgctttcatatcttttctaatgatggatttatccaatactgtcacccatatctaatttaattaattgatttaattcaactgcatattccattggtaattctcttgagaatggttcaataaatcccataacaatcatttctgtagcttgttgttttgttaaacctcgactcattagatagaataattgatcttctgaaactttagaaacagttgcttcatgttcaataattgaatcattattcatcataatattggttggaactgtatcgcttgttgatttttcatctaagattaatgtatcacattcaaccttacttttggcatccgtagcataaggtaaatggcgaactaagccacgataattcacttttccaccggttctcgaaatagatttagaaataatctgactagaagtatgtggtgccatatgaatcatcttagaacctgaatcaataatttggcaatcttcagcaactgcaatcgtaatacaagttcccttagctccttcttcagctaaaatacatgttggatatttcattgtaacaagtgaaccaatgtttccatccacccattccatagaaccatttttataaactttagcacgttgagttaccaagttataaatgttttttgaccagttttgaattgttgtataacggcattttgcaccctctaaaacaacaatttcaacaactcctgcatgtaatgaatctttagagtaagatggcgctgtacatccttctacataatgaatatcgcttcctttatcaacaataatcaaagttctttcaaattgggccatacgttcactattaattctaaaataagattgtaatggtttttctaatttgacacctgggggaacatagataaatgaaccacctgaccaaacggccccatttaaagctgaaaacttgttatcattataaggaataacagtatcaaagtattttctaaagatttctggatattctcttaaaccactatcaatatctaagaaaataacccctttttctttaacttcttctaacatgttatgataaacaacttctgattcatattgagcacttgctccagctaagaaatgttgttcagcttctggaatccctaacttatcaaaagtatttttaatcgtttcagggacttcatcccatttatcagttaaattatcactaggacgattataatatgtatattcatcaaagtccatttgacttaaatcaacaccccatgtaggcattggtttttctaaaaagcatttcaatgattttaaacgatattctaacatccactctggttcatttttaattgctgagatttctctgacaatttcttcattaattccttttggtgttttaaaaaccgaaacatcttcatctttaaaatcatattcagcattatttgtaggaatatcaagtttttgattagccatgtctattcctcactttcttctattagcttaattaatccattccaaccaagtgtcgcacatttaatacgattagcttgtttatgggtatttttaaaagctatggcttcttctaataattcttcatcataatctttttcataaatcatattcatataattttcaatgattttctttgcttcagctttcgtctttcctttaaccaaagtactcataattgatgttgaagatgtacaaatagcacaagcttctccatcataacgaacatctgcaattttatcaccatcaaatttcacttgaatatctaaatcatcaatacaagtgtctgaattcatattgactttttgataagtttgatcatcaaccaatcctcgattacgaggatgttcataatgatccataattatttccctcattaattgaggatcatccaaagaacgcatctaaaaagtcatctcctttcttacacacttcaatgaatttatcaatttcttctttcgtattatagaaataaaacgaaacacgtaaagttgaagaaacatctaaaaattcatctaatatttttgcacaatgttgaccagctctcacggcaattccatatgtattaaaaagactcgctccatcttgtgaaaaaacccctttaatattaaaagcaattgccccatgagatgtctcattgtaaatttcaatgttatctaatgccttcattttttcaatacaataatcacgtaactctttttcataagcatgaatgttatccattcccacttccatcaaataagaaacagctgcccctaaaccaacaacaccttcaatattaggagtacccgcttcaaatttataaggtggatttttaagtgtcacaaccccacagctgttataacgagaatttgatcctccacctaaacgtgttggtttggtttcacataataaattgtattttccatataaaacccctacacctgttggaccacacatcttatgtcccgaaaaggctaggaaatcaacatccgtatcagtcacatcagtaacttgatgaggtacactttgagccccatcagcaactacaataatgtctctttcatgggcataagcacaaatctctttcataggtgcctgaaaccctaaaacatttgtcacttcagcaatggcaatgatcttagtttgatcagtcacggcttttttaacattttctagcgtcaaacgaccttgagcatctaattcaatataattgacaacagctccaacttccctcgcaatatcaaaccaaggtaaagtatttgacgcatgttcagcaactgtaatcaaaatttcatcaccagctgataaatgcgtcttaccatatccataggcaatcatatttaaagaatcagttgaccctgaggtaaaaacaatttcttctttacgtgaagcatgaataaacttagccactaagcttctagcttcttcgtattgaacatccacttcatgtgataaatcataatctccacgatgcgcatttcctgaataatttgttaagtaatcgcaaactttattaatcacaacttgtggttttaaagttgttgctccattatcaaaataaataagcggttgatcgtgcatcgtttttccattcaacatcggaaaatcttttctaatttgttgaacatcaaacatattaagcacctacctttgataaagccttctcaaaacgttcttttaacatttcattatcaacgacttcaataactggttttaaataaccataagtaattaaatgcattgcttgtttcttacttaatccacgactttgtaaatagtaaagatgttcttcatccatctttcctactccagctgcatgggatgctttaacatcatattcatcaatatataaatatggattagcacttgcaacacatttggcatcaaagaccataatcttatttgtttgatgactagctgaaccatgttgtcctttagtaatggtaccaatgccatcaataactaattttccttcatctttgacaaccccataattatccatttgtccatatgtatgaggtgctaaatgttcaattaaaacttcaaaatgtttcttttccttagctttagaaagaattgccattctgactttaacatcagccccttcaccttgtaaataataatgatattgaccatcaaaactctcatctgataactcagcatatccatattgacaaacagcattttcttttaaataaatatcttcttcactctttgcatcttgtgatgtattttcactaaacacatgtataattgcatcatttgcaatcatcattgttttatgtaatgacgcttgactatccaatagcttactttcaatcaagcttacttcacttcgactagcaactttgatacataaatccattgactgtgacttatccaataaataaatcacttgaacttcaacaggttgaatattatcaaaagataaaaccccctcttgataacaaacacgatcaggtaaatgtgattcttggcaatcaccgttattaaaaacgatataaaattcactatttaaaacatatttattcatgtttcaattgttcctttttcccacaagttcctaagataatacgtttatcttcttcttgttctaattcaataccaagttccttgatccattcatatccttcacgatcaattttttcaaccaattcatacccaccactcatcacaatttgtccttgtaccaagacatgaacatgagttggtttaacaagttcaaataatctttcatagtgagaaaccataacgcaaccaaaatcatcactacgcattgaattaatagcttcactgacaactcttaaggcatcaacgtctagccctgaatcaatttcatctaataaagcaaattttggttgtaataatttcatttgtaaaatttcattacgtttcttttctccacctgaaaatccttcatttaaataacgatgagcaagattttcatccatatccaattcttcaatatttttatccaatgtacgaataaacttaaataatgaaatcggttcttcccttctagcattcattgcagcctttaagaagtctgaattagtaactcctgggatttcttgaggatattgcatacctaaaaacaatcctgctcttgctctttcatcaacactcatttctaatacatcttgatcatctaataaaatacttccacttgtgactgtatattttggatgacccattatagctgaaagtaatgttgactttccgttaccattaggtcccataatcgcatgaatctcgcctgtagtgacttccagattaattccttttaaaatttctttttctccgactttaacatgtaaattttttatctttaaagttgacataaaacgcgcccctttcgaacatatattttacgaaaaattactgataatgacaagtaatacgataataaatttattatacccaaacaacaagttttcaaaaagaaaaactctatagacgaatctatagagtcatgtctaacaaataccacaaatgataaccaataagataaacaatacaagaattaaggtaaatgatccttgatgtgccatcataaatatccctccctttctaaacaacaaaacaacataataaaatcaacaaaataaacaacacgattgtgatttcttgatgatgactcttgagctttgtatccatttttcctttccctcctctatgcacattatataatatggtaaaatgtcagtaaattttgtattatagcctactaaagttgaaaaaatattgatatcgtgtataatagaagtgttaatatcaaggaggtctatatgaaacaaaaacgacttgtaggactagctttagccagtttattagtcctaagtggatgttctagtgccgtcaaagataatggaaagtatgttgttgcttctattgatggtcaaaaaatctatgctgatgacatttataaaaatttgtcaacttcaacagagggaaagaaaaatttatttacttatgtattagatcaactcattcgagaaaatttcccagtaacatctgatatgaaagaaaatgcttcaaacattgcatcaaatcttgaaaacaattataagaatcaatatggagatgatgctgatgcgcaattagaaagtgcattaacacaaagtggttataaagatatcgacgcttttaaagattcagttgttcaatcacttcaatattctgaatttttaaagaaatatgtcaaagcaaactttgatgaagtgtttgatgattattacaagatggaagctcctcgtaagatgagtttaataaaagtcacaatgagtgatccagcaaatccaactgatgaagaaaaagctaaattagaagaaatccaatcattattaaaaactgacaaaagttttgaggatattgcttctcaatattctgatgatacaacaaagagtgctaaagggaatattgggattgtggattcaactgcaaaattaaaagatatttatggtgaagaagttgaaaaagctgctttaactcttgaacaaggtaaaatcactgcccctatccaaggaactggtggatactatattttaaagtgtacaacaactgataaagaaacaattaaaaaagaattaaagacaattgatgttgattctcctttacttgtttatgatacttatttagtatatcttgtttttaatacttatgacattaagtatggtgatgatagtgttaaagaaacaattcaaaagattgttgatgaaaatttaaaaacaagaactgatttaagaaaggagaaatcataatgaagaaattattaatgttacttctttgtggtggattacttgcagcttgttcttcaaattatagtgtaaaagtcagtgatagtgataaagtcattgtaagtggaagtgaacttaatattactaaacaagattattttgattatttattaaaaactagtggtgctaatgaagttcttgatgaagttttattaagtattgccgataaagaattaactgatcaaaaggctattgataagcaagttaaagaagaagaaaaaacatatgaacaatatgctgatggtggtttagataaatatgcaaaatcattaggttattcttcaaaagatgattttgttaatgaaaagattgttcctgtagttaaattaaatatgttaacaaaaaaatatattgaagaaaacttagaaacaatgatttcagaatatcaagttgtatcttttaaaaagattgttgtagataaagaatctgctgctttagcaattattaaagaagccacaacaaaagaagcttttgataagaaattaaaagaagctggaacaaatggtgaagatgctggtattgtcactaagaattcttcattagatgataacttaaagaaaaagttaaaagatttatcaaagcttgataaagatggtgtttatagtgaagctattaaattaagtgatgataaatatgctgttgtctatgtttatgatactgatcataaaaacaaagatgatttaattgaagctttagctaatgattcaaatgctaaagaagatgtcgaagcaaaatatttaaagaaatatcattttactgttaatgatgataaattagctaaagaaattaagaatatttcagatcaatatcttgaataaggggtttcccttattctttttttattgtaaaatgatattaatggaggtaaggtttatggataattgtattttttgtaagattgctcatcatgaaattggtggaaaagttttatatgaagatgatgtgtgtatggcttttttagatttaagtcaggcaacaaatggacatactttagtcattcctaaaaaacactatgataatgttttggatgttgatcaacaaacgctttcacatatgatgaatgtcgttcaggaaatagctaagaaattgcaaaataaattaggtgctttaggttttaatgtgattacgaatatgaatgaaattgctggtcaatctgttcatcatttccatattcatattattcctagatatcaagaagatgaaggttttaaggctatctaccaagatcgtagtgatcaagttgatttagacgatatttatcaaaagattatgcaatagagttctttgaactctttttttatgatttttatttttgtagaacatatgatataatatgaaaaaggagaaagatatggaaagaatcagaatcaatatgttatccaatgctgacaaagttgatggtcaaggtgttggaagtgcttatttagaacaagtatcacttattaaagatgaattgagtgatgtttttgatgttgttattaatgattcagctcctgctgatattattcattgtcataccattttacctgaatatttaatgaagatgaaaagaaacaagggtgttaatgttgcctatgttcactttttgcctgatactttagatggtagtattagtttacctaaatcagctttaaaagtttttaagaaatatattacctatttttataacactgctgatcatttgattgttgtgaatcctatttttattgatgacttagtaagatttggtatcgaaagaaggaagattcactatattcctaattatgtttctaaagaatccttttatcaagaaagcgaagaaaaagttctcactgttaaacaacgttatgatattgataaagatgcttttgttgttttaggggttgggcaagttcaaacgagaaaaggagttaaagattttgttgaagtagctaagatgttacctgatatcacttttgtttgggctggcggattctcttttggaaagattactgatggttatgatgaattaaaagaaatttatcagaatcctcctagtaatgttcatttcattggtattgtgcaaagagaagaaatgaatgatatttataatcttgctgatattttgtttatgccttcgtataacgagctttttcccatggcaatattagaagctgtcaatagtcaaaaacccctgctattaagggatttagagctttataaagatattctttttaacaaatacttaagtcaaaatgataatgttcaatttgctaaacaaattcaagaattaaaagatgattctcatctttaccaaaaatatcaacactattccaaagaaattagtgaatattattctaaagaacatgtcaaagaaatgtggaaagaattttattgtggtattcaaaaaagtggtcaataaaccactttctatagatgaagtgattgatgaatgaactcaattaatttttcattcacaacttcatctttttttatattcttcatttcttcaatacgattcatacattctccacaaatatcaattccaatcacatcacaatcagttaataaaatagctaataatgactgtaaatccaataaattgacttgaccttgatcccaattcgtttcaataacttgtttagataaaatatctttatcaatagagatataaattggtaagtcttttattttatctaatggaaaagaagcaaagcgatgctttaaaatatcatcttctaagaaaataatcactttatcttgatataagtgctcaattttctttttttgtgaagctgtcattccaattaaaataactttttgtaaataaggttgtgattcaattgcttttaaaatccatgaaccacaacctagcatttcatcaaataatgatttttgcatatcactatgatgatcaaagacaaccaaagcaaaaggatgtcttattttttctatccataattcactaatataatgataattgccattatcaataaaatgaattccctgaacatcaatgtttgaaatcatacgacgaatcatttgtttagaatgattatctaaaagtccatttgtcccttgtatgttttgacaatcaatccaattgaaattatctttttgataaaatctttgattttcataaataccagagaagttcataatcgttaaaatatttttcaattattcatacatctttggtttgtaaattgttcgattttctaaagcaaaaacccgtttagaatattctcctggttctacttgatctaaagctttatcaaacatattcattctagcatcaatgttgtcaattaaatagatcatttcagcttctttaatttgtggtaatactggtgaaccaaattcatttttaccatgatgagataaaattaaatgctgtaataagataacttcctcaccttcaatatttaattccttagctgcctcataaaccattgcttgagcaatagaaatatgtcctagcatttttccttctagtgtatacgttggaacaactggtccacttaattcaacagtttttcctaaatcatgtaataaaattcctgcatacattaaatctgcatttaaacttggatagatagctaacatactatccgctaatttcaacatagataaagtatgataagccaacccagacacacattcatgatgattacgacttgctgctggatatatttttaatgcttcaatatttttttccataagatgtttcacaattacataaagcttagtattggaaattcgtttaacatagctcattaattgttcaatcatttcatcttgatccattggtgctttgcttaaaaactgtacttgttgtgattgctgataagaaatatcttctatcttaacaatcttcatttgacgatcatcactatatttgataatatcccctttacctcttacaactgcaccattttgaagcgttgagatttgttcgtcggttgcattccataactttgcatcaattgttcctgtttcatcttgaaaaacaatgcttaaataattacttttattggcaccatttgtttttccagttgttacatgcgagatcatcgctgtaaattcaacgttatcattgccacatttcatatctctaattttaatcatcattatcctcccataattctctaataatttctaccacatcatcatattcataacctttttgtacaaggaaagtaatgattttgctttttaaaatatgtttatcatatctgtttttataacgattatagacacgataatattcttttgttaataactttttagtatgttctttaggaaatacaaaatcaaaatcctgaatagccctttcaacaacatcttgtgaaaagcctttattaaaaagcttgttcttgatattttgaataagtgcatattggggtcttgttgtattttcattatataacttttcaacaatttctaatgctttatcatattctaaatcttgggaataatcagctaaaaactcatcaatcacaaatggtgaaacaccatctttttttagattataaataattttattaacccctattcctagtcttgtcgctttatgaaaataatttttagtatactcgacatcatcaatcagattcttttgaacaagaagatccattgtcatctcaacttgtatatcatcaaaatcacctttatccgttaatttcttcaacatttttgcataagtataatctttataagtcaaatattttaaagccaactgatacgctctggcgacctgttcttgatcttttaaagcatctaattcttcccgatcaacaacttgtccaacacttaaaccatagcgatcaataacttgtgatgataaattcaaaagaacttgatgattatcaaattgaaaagctacattataagtatgccctttatccggtgttaaagacaccacttcataacaataatgatgctttgataaagctttatgataagctttcataattctttcataaaaaatctcactactatagtttttcgcatcttctaatgcatgctcaatcaattcacttaaatcactatcagccaaagttaaaattttctcgactaattgttgttgtgtctcaaagaaatatccatttctcccatcaataacaacaccttctagattcttatcataacgtgctaatactgggattccacttgccattgcttcaataaaagttaagccttgtgtttcagtaatagaagcagaaacaaatagatgcgaaacatgataaaaactaggaactttttcactcacttgtggaccagtaaaacaaatataatcatctaatccgtttgaatgaacatagtccttcagttcatcaacttgaggtccacctccaacaatcattaaaacaatttgctgattgacttttattatttcagacattgcatcaattaaaaagtctacacttttctctggagctattctccctaagaaagtcacaacaaatttattttctaaatgatattgtttcacaatttgttgcatcaattcttcatttttatgagctaaagaaaaatgctctaattctagtcctgttggaataacattaatagaattagaaattccatattctcttaaagcatcagccgttttttgtgaaggaacaatcaattcagaacagctatcaccgtagattttagaaatcttttcaataattttcttagctgcatgatcaaccgctttaatattccctggcgcaatataatgagaataatcagcccacattgtatggtaagtataacaaactggtacattcaagatttcaccagcaatcttaccaaaaattccaattccaaattctgtttgaatatgaataatatctggctgaaaatcttttagttccttcattcctttaaaagaataaatattagaagctcgatagccatagagcttctttaaatcaattccaggtaaccttaaaacatctaaatcctcatcaacatattggctatcatgaggtaaaaaggttgtaacaattaaaacatgatgtccatgtttttttaattctttttttaatatatgtgtagatgttgcaacaccattaatatcaggtaaatacgtatcactaaataaagcaatattcattcaatcactcctccaatttagaacggtttatctctttattcattgaaaagactaaaccacctataatcaaacccatatagtaagacataaaacgccataagaataatgacgatgaagtcccaacagtacctaagaaactaaataatagaacatatacaccttcactaccaccactagctccaggtatcggcaaaaatgcattaattaaataaataaatgaacataatcctaaaaagtcaaagaactgattccaagagacatttaaattaagtgccttagctgcaaaaaacggcatactataaataattgtcaacttcataaaattacaaagacatgattttacaaggacaggcttattccgttgtaagaaattcaattgttctctaaaatcagcaagatattgttcaatcttaacacatgttgattcataatctttgacaatatgaatcttacttaaaaatcttaaaacattatgcgttaaaaagttttgtaatttttttgatttagcgccaccaaataaccctaagatgaccacaaaattaattagaaaaccaagtattgcaagactaaaaactgccggttgatcttctacaaaatactgatatttaaataataacacaattcctgtatataataccaagacactctgataacaaataaaacacatcaaaagaatacttgccgaatttgttggtggtattccttgtttattaaaaatataaacttgagcaaattgtccaccactcgcaaatggtgtaatcccattaaagaaagttccactaatggcattaataaatgattgtttaaacgaataatcttttttgtaagcaagaccaaaataccacaatgaaagtgcgtcaaataaataataggagaacataacaattcccataacagcaatccaagaaattcttgcttcttcaaaagcatggatgacttgatcaaactgcttaccaattgacaaatatattgaaaccccaccaattatcaaaatgagtgcaatattaaaaaaatattttttatttctcatacttacgtgctttaaaaatccatcaaattagatttttaaatactcctttctgataaaagaaagcctatttctctttttatcatattcattcattattatattagaattgtattcttcactgtaagtgtactatttcctcaagctaattttactacatttcagacaatatgaaaagcaaaaggagaagaaagatgggataaatataaacaaaaaaagagagatatcgaatgatatccctcaggagaactggcagcttgctattgtcgcaatcgctcactatcttcgccgttatgatgcttaacttctgtgttcggcatgggtacaggtgtttccatcatgctatcgccaccagatctcttgcgagcacgaacgctcaaaactgaacagtaactagcttctctctccttgaactaccttcttaggttaagccctcgacctattagtatcagtcagctcagcatgtcgccatgcttacacccctgacctatcaacctcttcgtcttagaggggtcttactttccttcgaaatgggaagtctcatcttggagggggcttcacgcttagatgccttcagcgtttatcccttccagacttagctacccagctgtgccactggcgtgacaactggtgcaccattggtctgtccaccccggtcctctcgtactgagggcagctctcctcaaacttcctacgcccacgacagatagggaccgaactgtctcacgacgttctgaacccagctcgcgtaccgctttaatgggcgaacagcccaacccttggaaccgacttcagctccaggatgcgatgagccgacatcgaggtgccaaacctccccgtcgatgtgaactcttgggggagatcagcctgttatccccagggtagcttttatccgttgagcgacggcccttccattcggcaccgccggatcactaagcccgactttcgtccctgctcgacctgtatgtctcgcagtcaaacacccttctgcctttgcactctgcgcatgatttccaaccatgctgagggtatctttgggcgcctccgttactctttaggaggcgaccgccccagtcaaactgcccacctgacactgtcccgtcatcggcttcacgacgtccggttagaacttcaatgcatcaagggtagtatcccaacgtcgactcctcgaatactggcgtatccgtctcccagtctcctacctatcctgtacatcatgcatcaaaatccaatatcaagctacagtaaagctccatggggtctttccgtctagtcgcgggtaacctgcatcttcacaggtactaagacttcaccgagtctacagctgagacagcgcccaaatcgttacgcctttcgtgcgggtcagaacttacctgacaaggaatttcgctaccttaggaccgttatagttacggccgccgtttactggggcttcaattcatggcttcgccttaagactgaccactcctcttaaccttccagcaccgggcaggcgtcaccccctatacttcgacttgcgtcttggcagagagctgtgtttttggtaaacagtcgcttgggccgttttactgcggctcagctttcactgagcactccttctcccgaagttacggagtcattttgcagagttccttagctatagttctctcgctcaccttaggattctctcctcacccatgtgtgtccattttcggtacgggctgacttgaggtatcgctagaagcttttcttggaagatggcttcggcgacttctgtacttatcgtaatgttccatacgcttcacgccttcgggttatgacatccggatttgcctggatgtcccctacctcgcttgcaccagctattccagcagctggatcgcctagccttctccgtcactccatcgccctcacgccaggtacgggaatatccacccgttgtccatcgactacgcctctcggcctcgccttaggtcccgacttacccagagcggacgaaccttcctctggaaaccttgggtcttcggtgcgtgggattctcacccacgtgccgctactcacaccggcattctctcttccagccgctccacatgtccttacgatcatgcttcctcgctgactggaacgctcccctaccacttatattctctataaatccatagcttcggtattatgcttagccccggtaaattttcggcgcagagtcattcgaccagtgagctgttacgcactctttaaagggtggctgcttctgagccaacctcctggttgtctggacatctccacatccttttccacttagcatatattttgggaccttagctgatggtctgggctgtttccctcttgactacggaccttatcacccgcagtctgactgccgcgcatgtcctcgtgacattcggagtttgattatgctcagtacctcgggatgaggccatcacatattcagtgctctaccttcacgtgacttcgcgcgacgctagccctaaagctatttcggggagaaccagctatctccgggttcgtttggaatttcacccctagccacaattcatccgccaacgtttcaacgggggtcggttcggtcctccatcgggttttaccccaacttcaacctgatcatggctagatcacccggtttcgggtctatgacatgcaactgtcgccctattaagactcgctttcgcttcggctccgcgtctcccgcttaacctcgctccatatcataactcgccggctcattctacaaaaggcacgccatcaccctttaacgggctctgacttcttgtaagcatatggtttcaggttctctttcactcccctcccggggttcttttcacctttccctcacggtactggttcgctatcggtcactaaggagtatttagcctttcgagatggtcctcgataattccgtcaggatttcacgtgccccgacgtactcaggtactgcctcgcctctctccacgatttcggatacgggagtgtcaccctcttcgctgcgccttcccctgcgcttctcctatcatgtcaagtcgactttattggcagccctataaccccatctttacgatggtttgggctcctccgctttcgctcgccgctactcacggaatcgttcttactttcttctcctgcaggtactgagatgtttcagttccctgcgtctcgcctcgtctgactatttattcatcagacgatatcatccctctcggaatgatgggttcccccattcggacatcgacgggtcgttgcctgcttactgctcgccgtcgcgtttcgccgttcgctgcgtccttcttcgcctcttagtgcctaggcatccgccatacgctctttcttgcttagcctaaagtgttcaagttctatacttttttctcgttttttcttagttttttgcaactagatgaattgaccttcaatcactcctgatctcgtttcttcttcatctatcttcttcttgtaaaaagtttttgctagtttgctattcagttttcaatgttcctacttctctcgaatgtcctctcagacattcaaaactaaacagaattccacgcttcttctccttagaaaggaggtgatccatccccacgttcccgtagggataccttgttacgacttcaccccaatcatcagtcccaccttagacagctccttccttgcggttaggccaccggcttcgggtgttaccaactctcatggtgtgacgggcggtgtgtacaaggcccgagaacgtattcaccgcgacatgctgattcgcgattactagcgattccaacttcgtgcagtcgagttgcagactgcagtccgaactgagaacgggtttctgggtttcgctccacctcgcggcttcgcttccctctgatccgtccattgtagcacgtgtgtagcccaggtcataaggggcatgatgatttgacgtcatccccgccttcctcctccttgcagaggcagtctcgccagagtccccaacttaatgctggcaactggcaacaggggttgcgctcgttgcgggacttaacccaacatctcacgacacgagctgacgacaaccatgcaccacctgtatcccctatagctatctctctatctctagagcctttaagggtatgtcaagacctggtaaggttcttcgcgttgcttcgaattaaaccacatgctccaccgcttgtgcgggcccccgtcaattcctttgagtttcattcttgcgaacgtactactcaggcggagtacttattgcgttaactgcagcactgaggtctgacccccaacacttagtactcatcgtttacggcgtggactactagggtatctaatcctatttgctccccacgctttcgggactgagcgtcagttgcagcccagatcgtcgccttcgccactggtgttcctccatatatctacgcatttcaccgctacacatggaattccacgatcctctactgcactctagctcctcggtttccacggcttaccgaagtttagcttcggtcttttaccgcagaccctagttgccgcctgctccctctttacgcccaatgattccggataacgctcgccacctacgtattaccgcggctgctggcacgtagttagccgtggctttctcataaagtaccgtcactcgcatgtcattccctacatgcgccgttcttcctttataacagaggtttacataccgaaatacttcctccctcacgcggcgttgctcggtcaggctttcgcccattgccgaaaattccctactgctgcctcccgtaggagtctgggccgtgtctcagtcccagtgtggccgtccaccctctcaggtcggctacgcatcgtcgccttggtgggccgttaccctcaccaactagctaatgcgccataagtccatcctctcgctatcccataggatatttaacataactctcatgcgagaattatgcctatgcggtcttagctatcgtttccaatagttatccccctcgaaaggccaggttacttatgtattactcacccgttcgccactcaccaccgaagcggtgcgttcgacttgcatgtattaggcacgccgccagcgttcatcctgagccaggatcaaactctccattgtctatctctaaagacaacttctgtcttctagctcttctttgtttcttcttattgacgtgttttctgtttagttttcaatgtccgtttgctgccctcttgccgagtgctcatctataataccatctcatccctccctttgcaagtcttttttttactttttttgcacttttttatcgtttcattgaaaaacgctgattccatcgcaattttttgaatcagcattttttgacattttatttataatgaacagcagatgttatagcatccatcaaagtagcacgtatattccctttttctaacgcttctactcctctaattgttgacccacctggggaacaaacttgatcttttaatactcctggatgcaatgatgtttctaattgcataagtccagaaccaacaattgtttgtgaagcaagtttataagccatatctctaggaacaccttcctttactgcgccatcagctaatgcttcaataatcatgtaaacaaaagcaggtccacagccacttaaagttcctgcagcccccattaaatgggaaggtacaacttcaatctcgccaatcgatgaaaacatttttttaacaaaatcaaattcttctaaagtcaatgaatgggtttcttcaattaaagacatacccgctaaaacacgggcaggtgtatttggcataacaaaaatatgtcttgtagatgaatctagcaattcttgataacgagcatagttatatcctaaaacaattgaaattaatgctttgttttttaacaaatcaatcaatggttctaatactttctcgacaacttgcggtttaacaccaataaaaaccatttcactttcacaaacaacttctttttcatcctttgcaatcacaaatcctaaatctttaactttatctagctgtgaactgacaatatcataaacaataatatcctcaccttttaaaaatcctgatttaacaattccttgagcaatggctcctgccatatttcccataccaataaatcctaattttttcataaaatcctccttatacaagaaaagctaacaaacgttagcctataattttctatttcttaaaaatgctggtacatcatcgtcatcatcttcaacatcataaacagttggtcttactgttgactcatatggagatgtttgttttggttgattaggcgttactggtgtaacttcttcttcatcttcaaaaccagtagcaataactgtaacgataacttgatcatctaattgttcattaattgccacacctaaaacagtattcacatcattaccaacagcttctctaattgttgctagagcagtattagcatcatataatgtaatatttgttccacctgtcacattaacaatcgcatcttttgcccctgcaatagacacatctaataatggtgatgaaatagcacgcaatgctgcttcttcagctttattttcaccatcactcataccaattccaattaatgcagaacctctatccttcataactgaagatacatcagcaaaatcaaggttaataaaagcaggaatagcaattaaatcagtaattgtttgtactccttgtcttaatacattatcagcttctctaaatgcttcacccataggttttctaccaatcgcatctaataaacgatcattagaaacaacaataattgaatctacattttctcttaactcagccaaaccacctttagcttgtcttaagacctttggtccttcaaaggtaaaaggagatgtcacaaccccaactgttaaagctcctaattctctagaaatctttgcaacaacaggtgcagcaccagttcctgttcctccacccataccagcagcaataaataccatattggcaccagctaaagcttgtctaatttcttcttcagtttctaatgcagctttacgtccaacttcaggatttcccccagcacctaaaccatgtgttaattcttttcctaagataattttattttcaatatcgataccttttaaaatttgagcatccgtattggcaacataaaagtcaacacctctaacaccgtctttagccattcttgcaacggcattacaaccaccgccaccaacaccaataactttaatcttcgcaacctgaacaaaatctaaattactatccatatttcctatcctcacttttatattaatcttcttcgctaaaaaaattctcaatcactttagaaaactttccttttttcttatccccatgaacgggttttgttttcgttagtcccttaaaacgaatactcatcgtactagaaatatctggtaaaaccaccgaaggatctaaatgtcctaaaatctttgcacgatcatttaaataatacatcattcctaaacatgaaacaaaagacatatctcttgccccaattgtatcaggacgataagttctaactgcactttgtaaaatctcactagccacacgatcaatttcaggaagttctccaccaccaccaacaatcacagtttcatagcttcttccatcattaatcacatcaattttagtcttaatgacttccatgatatctttgactccagcagataaaacttctgacaaatctttttgtgtgtaatgtttttcaaattctttatcgcgtgttgtatgtataatatcttcgtctccaatattgagatcacacgttccatatttcactttatacacctcagccttatctagaggaatttgccaagatgtagcaatctttttagtcaaatcatatccaccaaccccagcttgggcaatatattttaaatatccaccctcaaaaaaagcaacagttgatgttctataaccaatatcaatcaatatcgcaccttcttgaagatatactgcatcaaaagcttcttttgcacaagcataagcgttgattgtaatatctaaaacttcaacaccagctttttcagcagcactgatatatccataaagaagttttttctttgttgtaataatcaatgattcagcctttaatgatgcagactttgctccaataggtacttctttcattgatttggtatcaagttgaaacattgtaggaataaccgaaatgacttcctcgtctttatctaattcaaaacgtttagaaagttttaaagctctcacaacatcatcacttgtaatttgatctaaaggagaattgacctttgtaattccatcactttgataaatatgtgcatgaaatgaaggaatacataaagcgactttcgtaatggttgctcctaatgattttgaagcttcatctaacaacagtttgatttcactaacaacactaggcatattttcaatcttacccttacgaattccgtgactcgttatttttttcgaaaataaaatatttatattagcacttacgacttccccaactaggagtttaatcgttgcacttcctatatctaacacagcatagatatctttcataaatgattctcctttaaaaaaatacttctttatcattgtatcataaaattcccgataagaaaacacataatcttgaaacaaagaatcttttttaagcaaaaaatgtaccttgttagacaagatacatcatttacattttttcatataaacatgatttccttcaaaactaaattcgcaacgatcactataagctgtcataaaagcctcataatcaaatttagaaagttgctcaaccatactctctactcttaagtagagaatcttgccattatccatcaaaaacttcaaacgtgatgtatcagctttgattggcgaataaatgatatcactcgtttgactcttaattaattcaggaatttttacatattctttagcaaattgttttaaaaactttaaatctttaaaacctgttaactgcggagttgcttgtaacgaagcaattatactttgatcagcggttaaagaaacattgcctaattcatcaatcacataagttgttttatcaatgatacaataagctactttttgagcttcttcaacttctattttgacatgtccaagccaatctttactgacataagcctttttaatcaaaggaactgttttgacttcatcttcaatcttcccagtatttacaaacagataataagaagatttattaaccgatattttttttaaaatatccgctgttttcacttcatgattacctgtaaccacaatagatttaacctttgaataatcactcacaaaatatgctccaatacaaacaaaaaccatcaaataaagaagaactttaaaacgtctttttaactttttcttcttttttgtttttaaaatctttatagcctgattctcatcatgttcattataatagtattcctgttgatgagacattcacatcacctactcccagttaaccaagataacttctttctctaattccactctaaaacgatcaaaaacagttttttcaaccaataaaatcaaatccaaaatatccttagcactcgcataaccattattaacaataaaattagaatgctttggtgaaacttgtgccccaccaatttcatatcctcttaaaccacattcatcaatatatttccaggctggtttttcttcaggatttctaaaaatacttcccgcactcgcaaaattccatggttgtgttgtcatccgtttttctttacgtttatctaaaacttgcataatttcttgaggatcacgtggtgccattgtaaatgttgcttccaccaaaacccaatctttatgctcttgtaaaatcgatttacgataagaaaattgcatttcttctttacttaaagttaccaattctccttcgtcatttaaaacaactgctgaagtaaaaacatcagccatacaatatttataagctccggcattcatataaacgcctccaccaattgttccaggaattccacccataaattcaaaaccagaaagaccagttttggctgcttcataagccaaataaatcatactgaccccagctccagcacgaatttctaaacaattaatatgcacatgattcaacccttgtgatagagaaaaaatcacaccctcatattctttatcagaaaacaataaatccgaacctttaccaatcaccatatgttttacttgatgttgacgacagtaatgaataccacgtcctaaagcatcaatatctttaatatgcacaaaaaagcgagcaggtccacccactttaaaagttgtatgtttatacattggttcattttctaagatttcacctaaatccaaatcaaccaaatcatagaatacttgatcaaaatccatatctatttcctttctaatgtttttaatatttcttgataaatatcttcacaagcatgaggttttcctaaagcctttgcatgacttgctaaattctttaaaacatcctcatgcgataataaatatcttgtttctttgacaaattctgaagccgttaaatctttttctaaaatccaatgagccgctgatgcatcaaccaattctttagcattgtattcttgatgattagcaaccacatatggacttggaataattaatgatgctgctcctaaagcagtaatttcagctaaagttgttgcgccagcgcgtgaaacaatcaaatcacagcttgctattaagctaggcatatcatcaatataacttaccaaatgaatggaatcatttaaatcttttaattcttccttcatttcatcataataatttttacctgttacataaacaatatcaaaagcatcatattgcatctgtcttaaagcctctttcatcactttattaactgatgaagaacctagacttcccatcacaataacaactgtttttcgtgaggaaggaatgttgtaaatatcatgaatatcctgcattttttgatgagtcacaacactcgcacgaggatttcctaataaaaccgtcttatcatgaggaaattcattatacgccttttcataacaacatacaatcttatcaactttttttattaaaattttattggttaatccaataattgaattttgttcatgaatcattgtaggaatattcatctttgctgcagctaaaacaattgaagcacttggatatcccccaaatcctacaacaatatccggttgaaattctttcaatatttttttagattcttttaaagatttcacaaaaatcatagcgttctttattttttgtaaaggattgccaaccaacccttttacttttaatcctttataagcatagcctttttgtggaaccacttgtgattctaaacgatccgttgttccaacaaataaaaattcagcctttatatcttgtgtctttatatattcaacaagagctaacgcgggatataaatgtccacccgttccccctgcactaacaattatcttcatttttatcactcccattgtttattatagcacacaatttgcagatttcgagatattaattaaaattcctatactcattaaagtaattgttaaacttgttcctccatatgacatcaatggtaatgtaactccggttactgggaacaatcccacaacaacacctaaattaattaatgtttgaatcccaatcaaagaaacaattcctatcatcaaaagactcccaaacaaatctttgacatttttactcacttgtaaaattgttttaaacaaacataaataaagaccaattaaaataatccctcctaaaaaaccaaattcctctgcaacaatcgcaaaaataaaatcagtctgtggttcaggtaaataaaaatgcttctgaatacttttatcaaaacctacacctaacaaacctcctggaccaattgcatacaaagcttgaatagcttgaaaaccacttcctaaaggatcttggaaaggatctaagaaagataaaatacgtttcattcgatatggtgcagaaagaatcataaaaacaattcccaccactcctaaggcccctaaaaagacaaaataaataaaaggaaaaggtgaaacaataatcataacaacaatactacatgccataacaattccactaccaaaatccggttgtaacataatcaataaaaaacctagtcccatcacaagcagcaactttaaactgtatttcaatttcttcatatgataataatttttttcaatgtatacagccgcaaaaataatcattccaatcttaaataactcactaggctgcaaagcaaaaataccaaaattaaaccaactacgactccctcctctgacaacccctaaaccaggaattaaaactaatatcaataatagaaaacaaactaaaataattggtttataatattttttataaagatgataatcaatccgtgatgttataaacatcgcaataatcccaatacaagcaaaaatcgcttgacgtttaatataatataaggagtcatcatatttataaagtgcccagacatgggaagaactataaacacttattaatccaaagatgacgataattaaggttaaaataatgattctttttgttttcatggtgattcctccatcatttaaacatatgaaaagaacagacaaaaaagaagatgccttagacatcttcttaatcttttaacatagctcgacttgaataatacgtcaccatcatgtaaccaccataaatcaaaatgataaagataaccgtagctataattgatggtaataaattttgttttccaaatgttgaaataatatatgtacaaaattgaattccaaaaactgaatgaacaatcgctaccatcaatggagcaacaaagaataaagcaatctgtttaaacaaagctttttgaatcattttttcatctgttccaatttttctaagcatcgtataacgttctttgttatcagcactttcacttaattccttcaatgccaataaagctgcacttgatatcaagaaaacaacaccaatataaatcccaatgaaaattaccattgctccaattccgacactcccttcataaatcgaaatacgtgtgattgcatcaagattcgtatttttactgtaaggatgttgatcaagggcaataatcttatcttcaattgcttgacatccagctttatcattagccttataattagcaatcataatattttgcgcacgaatactttcattaactgcttgatctggcaccaagataattcctgagttgctttcattggaagaaggaacaacaaagccttcttgacatgtttgatacttaggagtgtatgtttgattaagcagctgaataggactattcgcttttaaaccttgatttcttattgctaccatattatcaaaattagcaacaatcatatattgatgatctgaaagttgaaattgtttttgaccatatcttttagcaatctgattataatcacttatacgcataatattttcagccatatcggtatttaaaaatgtatatttttgtttgattgatgggaaggcttttcctaaagtatctttcaacgttaaatcattggttgcatatgtattgacggtataaacatctttaaaatatttatcaatagaaaaatctaattgatggaaagtctcggcaatacttatatgcgaatcagcaatttcaccttgagtatattgttttccattagcattttgacctgccaaatcccaatttttttcaagataaatatccactggtgtaaattcttgcatatttgaagtcacagcattctttaaagctatcccgcttgataaaacacaaatggttgtaaataacatcaaacaaataagactcatagaaaaaactgttgtattcatttgtgagctaaattgtctcacaacaaaactatttaaacctttgaaataatgctttttataaaacatcatgattttcaaaataaaacctgataatgaccaaaacaaaagatatgtcccactaattcctaaagcaattggaataaaaattttatctgcactatctaattgtgtcactcctgctgttactaaataataagcataacctagcatcccaatagataaaagaaaaaccaatgtacaaagccaagtatttttagctttgatctgttcatttttacgcttagacaacaacaaatcaatcaattgctgacgtccaattgaaaacgtattaaaaatcatcacaataacataaataaccccaaaataaagaattgttttgaaagtagctgatgatgagaagataaattcaaagcgggtcatatcagcttcaaacatatttgctacaaaaatactcatcacttgcgataaagcaatccctatcaataaaccaaaccccaatgaaacaagtccaatcaaaaaagtttcacataataaaatccaagagatttgtcgttttcccattccaagtatcatatagattccaaattctttatgacgtcttttcatcaaaaaacgactcgcataaataatcaagaaacctaagataaaagataccaagacactaacacctgacaagaaattaaccatcattttaataatttcacgagtagatgaggaaacatccatcatcacactttgactttcaatagaattaaataaatagaaaatcgcaacacctaaaactaacgtaaagaagtaaatcgtataatcttttaaactacgtttgatatttcttaaagagagtctcaataacatcttattgtcctccaagtaatgtcacaacatcaataatatcatcaaagaactctttacgttttttatcgcctcttaataactcattaaagatttgaccatcttttataaaaaccacacgtgaagcataactggcactaaaggcatcatgagtgaccatcataatggttgcctctaattgttcatttaattgacgtagacttgaaagtaacatttgtgatgaacgggaatctaaagctccagttggttcatcagctaggattaattgtggattggtaatcaaagctcttgctgaagcaactcgttgtttttgtccacctgacatttggtaaggaaatttatttaaaacatcctcaatatttaaagcctgagcaatttgttgaactcgcttttcaattgtttttgcagcaactttttgaattgataaagctaaagcaatattttcatatgctgttaaagtatcaagcaagttaaaatcttgaaaaataaaaccaagttcctcacgacgaaaacgattcaaagcattaccttttaactgagtaatatctgtttgaccaatataaatatgaccagcagttactttatcaatcgttgatacacaattcaataaagtggtctttccacttccacttgcacccataatcgcaacaaattcacctttattgacatgcaatgataaatgacttaaagcttttgttagatttgacttattaccataatatttatcaatattttcaattcttaaaataggttccatataaccttcctcctttgtcatcttcattatgtctgatttatatatatgttgccatcgatgttcctaacataaccttacaattttgtcacttcatccatatgataataatgattcttataaaaaataatatttacttttgtatattgattcacttttgattcaattgtcatagtatgccccagacattcacaaagcttatgacaaatataaagtcccattcctgtagactttttatgcttacgaccattttctccggtaaaagacttttcaaagactcgtggtaaatcagaagcacaaatcccaatcccattatcatagattgataaaacaattgcttcttgattttcataagcagaaatttcaatataggaatcacttgtatttttgctgtattgaaaactattatttaaaacttgattcacaataaattcaaaccatttcatatccgtaacaacttcataatctaaatcttttaattttatttttaattgatgaaaaataaaataatctttatttttcacaatgacattttttatcatttgtgacaaatgattatttttcacaagataatctttttgggcactttgactacgtacataataaagaatctgatcaacctgattttctaatttacgaacttgttcaagaatttgtaatgatacttcactcttgtgattatgaacagtcaaagtgagatgcgataagggaatctttacttcatgaatccacatctcaacatagtctttaaaatcttccatattcattgataaatcattaattttctctaacatagacttattaatatcatataatgattgataaagaattcttccttctaaaaacgaaggttctttgatgagttcacaaatcaaatacttttcttctaacatctttaactgtgataaataatttgtataaaattgttttttcctttgataatcaaaaacctcaatgatacttataaaccaaaaatcaattcccataatcaaaataattaaagatatattcacatgaaaagccaataacatcaacaatgtcataacaaccatcataccataaaataaaaatataaaagccttgtcttgaagatagtctttcattgtcataccaatatataccctaatcctttccttgtctcaattacatcaccataaccaatgcttcttagtttctgacgcaaacgactcacattaactgttaaagtattatcatcaacaaattcttcactatcccataaatccatcataatttcttcacgtgaggcaatttgcccttgatgaataatcaaatattttaaaataagcatctcatttttagttagaatcagcgtttcatcatgacattttacaaccccacgatcgggtattaaaaccaaatcacgataagtataatgattcaattttcgatgaacccgtcttaaaaccgcttcaatccttaacaataataaagttggattataaggcttgcaaatataatcatctgccccatagctcatacttaaaacctcatcgacttcattattttggctcgttaccataataattggaatctgtgtttcttttcttaattcctttaacagcaattctccattcataaagggaattgtaatatctaataaaacaaggtctggacaaagcgctaaaatttcttccttagcatgttcaaaatcttttaaaatcattccatcatatccagcattatccaataacaatttcaactcttgacataaatcctgatcatcttccacaattaatattctcatgactatcatcacctctgtttttattatacatgaatttaacgtcttttgaccttacaaaattgtaagtaaaaagaagatgtttccacatcctcttaaaattcattcacaatttgtttaaatacatttcctctttcttcataaccactaaattcatcataagaacttgtcgaaggagaaagtaaaacaatatctccatcttttgcaatttctttagcttttaaaattgcatctttcatatgttcttcgacataagttgaaggacaatgcatttctttagcaaacctttctttagctgccccaaaacatattaatgcttgtattttatcttgataagttgacatttcagataaatcaagtcctttttcatgaccacccatcaataaaataacaggtttttcaaaagcttttaaagcaataatagctgcatctgtattagtcgcctttgaatcattgtaatatttgaccccttgatattctcttacaaactctatacggtgttcaacccccataaaatgagctaaagtatcatgaatacatttcttatcaactcctgataatgcacaagccataatcgcaatcatcatattttgaatattatgacgacctacaatcttgatttcatctaaatcaataatatgttctcccttaaaataaatagcttcatcttgaatcatacaatcagcttcttcaacaagtgagaaagtcaaaatagaagctggaactggataacgttttaaatattcttgtaaaataggatcatctttattttctaaaaaataatcattttgatcttgattcatataaatacgtgttttcgaagcataatattcatcaagtgatgccatataatctaaatgatcaggcgttaaattaataatagtagaaatatggggatggaaagtgtcaatatctaacaattgaaaatttgacatttctaaaaccacatcttgatttttattttctaaaagattattttctaagactaatgaactatatggtgtcccaacatttcccgctaagcttactagatgcttagcatcacgtaagattttatcaattaatgtaacagttgttgtttttccgtttgttccagtaattgcaatatagttttgatgtttagctaattgatagcctaattcaatttctgtataaacaggaataccacgttcttttaaacgtaagataaaaggtttatgatagttgattcctggattttttacaacaaaatcaaaatctctttcaaaaagttcatcaggatgtccaccaacaaccatctcaattccacgattcacataatcatcataacacgctattttttctcttgatgcaaattcatttacagtgattgtggcatgcatcttatccaacaattcaacagcagcttgaccactcttagctaagcctaatactaaaacttttttcccctttaacattttacataacccctaacacaatactaataattccacaaataaatcctaaaaaccaaaatgaaataaccacttgttgttcactccatccaagcatttcaaaatgatgatgaataggagccattttaaacactctttttcctcttgttttaaaagaaacaacttgaataataacagacaatgtttcaatcaagaaaaccccaccaattaaaataaataacaattcttgatgagttaacacagctaaagcagctaaaacgccacctaaagcaagtgatcctgtatcacccataaaaatacgagcaggatgataattgaaatacataaatccaagcaaagctccaacaatgaccatagcataaatcgcaatttcataatttttattcataattgcaaaaataacaaagactgatgttgcagtaattgaaagcccggttgctaaaccatctaacccatcagttaaattaacagcattgctgccagcagtaaacataaaataaaccaaaacaggataaaaccatcctaaatccacttccatatgtagtaaaggaatagtaatcatagaattaaaatcaggaataaaatattttgctaataagtaaaaagcaatagctgcaactgattgcaaagcatatttataaattggttttaaaccttcatttgtctttctcacaacaattaaataatcatctaaaaaaccaattaatccaaatcctagaaaagcaaaagtcaataaattaacataaggattttgaaaaaatgaaaaatttaaaacatatacaacaacaatagaagctaaaataaagacaatacctcccattgttggcgttccaccttttgccttatgagacgctaacccttcttccctttcaacttgaccaaattttaatttctttaaaaattgaatagatttaggcataactaccatcactacaataaaaccaacaataaaattaagaacgattcttaaaaagaccatactaaacataattagactcctttatacgtattttatcttttacaatatatcacatttccccctcaataacaacccacgccaaaaatgaaaaagcatattttcgataaattttgttaccatcatggatgaaaaaacttttgataaattcaagatttatcgaggtcacaccaattatgtatataattatttattaatgtaataaaatattattattatctttattttccgcttattttatatataatgttagctaggagtgaaagagaatgaaaaaggcatttagtaatgaattatatgtagaacttcagtcaaaacatattcaagaaagaattgctcaatttgacaataaactttacttggaatttgggggaaaattatttgatgataatcatgcttcaagagttttacctggttttgaacctgatagtaaattaaagatgttattgactttaaaagataaagttgaagtgattattgctgtttgtgcaaaagatttagaaagacataaagtcagaagggatttgggaatctcttatgatgatgaagtaattagattaattggtgaatatgaaagagtaggattatacgtagggagtgtaacaattactcaatatcaacatcaaaatgcagctgatacttttaagctaaaattagaaaatcgtggaattaaagtctttatgcaatatccaatcgaaggatatccacatgatgttgatcatattatttcacctgagggatttggaaaaaatgattatattataacttctaaaccattagttgttgtaacggctccaggacctggttcaggaaaaatggcaacttgtttatcgcagttataccatgaacatttacatggcattaatgctggatatgcgaaatttgaaacatttccaatttggaacttaccattaaaacatccagttaatttggcttatgaagcagctactattgatttaaatgatgtcaatatgattgacccatttcatctagaaaaatacaatgaaacaacggtcaattataatcgtgatatagaaatcttcccagttttaaatgcaatgtttaaaaagatttttggtgaatcaccttatgcttcaccaactgatatgggagttaatatggttggatatgcaattatcgatgatgaagcagcaaaagatgcaagttgtcgtgagattgttcgacgttattatcacgctcaagttgattatgtgagtggaaagattaataccaaatctttagagaagatgcaaatgttattgtctcaagctaatgttgatgcaaaaaatcgtaagtgcgcaattgttgctaaaaaattagctgaagaaagacaagttccagcttgtgctattgaattaaatgatggcagcctgattagtggaaaaacttcttctttattaagagcttcaagtgctgcgctattaaacgctttaaaatatttagcaggcattaatcaagaaattgaattaatttcaccaaacatgttacattctattctttctttaaagaataattatttaaatattaaaaacccattattagatattgatgaagtgttattgacattaacaattgcttcatccgatgaacctaatgcaagaaaatgtctagaagtcttaccattattaaaagactgtgaaattcattcaacagttattttaagtaataaagatatggcaacccttcgtaatttacaaatgaatttaacttgtgatcctaagtatgcaactgcttaggatttttttcataaaaaaaacctcacaagaggtttttaagcattcatttgcttcatttcgtgatattcacgactaacactttgatagagttgtacaaatgtataattgatattatgttgagttaacatagctttataaggaattggtgggattttattcattttaaataattgtaaaagaatatctaattgttgatcactcattcctgcaaagaatacaaattcttggctcatatcaaaatcaacttgttgtggaattgatttttcataacccttcatctttaaaagatatcccattgtttcataaatctcatcatcttcaatgatacgaatatcaatctttaaagatgttgcaatttcattaattttaactttaatttcatcattgacatgatataacaaaattgtttctttcataaaaactcctttattggtctaaatttcctgcttctgtaacaaccttttcattactcattaactgatctatatactttgttgcttgttcaatagattctttttgtggaacaatgacagaagcacttattccacccattgaataacaaggttgagattgtggttcacctaaaatttgataagactgtatatcccaagatggcatttgagataattgcatttgtaccaaagcattgatatcattgctagataaatttgtttcaacactttgacttactgtatccaagacagaagaaaatgaagtcaagatagctggtgaagcaactttcttcacaattgcagcaatcattctttgttgatttctacctctcgcaaaatccccatcagcaaaagactttctttctctgacaaaagctaatgcttgtttagcatttaaattattctcaccttttttaatcttatacttaccaatcttagttgtaaattcagctggtgaattaactgtaattcccccaatcgcatcaacaatcttaacaaaagatgtaaaattcatacgaacataataattaatatcttcattaacaatatccttcaatgtatcaatactttcttgtaaaccataaattcctgcatgcgtgaatttatctaattgtccattcatatgtaaaggataatatgtatcacgaggaatgctgattaaaagaatttgctttgttgttggattaacagccgccaacatattcacatcactacgagaaacagctgataaaccaccatattcatcattaccactaatataaaccaaaaatggcttttcagtgacattcacactcttagcattaactgcactttcatcttttttaacctgatagattacccttgtatcttcactaaaagttttaaaactttgttctactaaacttctaaaagcttcatctaaaacaatagcatctactgtttgactattcaatgctttaactaaagcggtaaagtctttgaaatcttttaattgaatatttcctacatttttttcaatttcattggttgcataactcatactcgttggatctatagatgaaatataacccgttgtatgttggggaagctgacgttcatttttaattggtgaatcttttaaaacaatgaccgagatagcacgggtttgaaatttactctcactcatgagattaaccgtttctcctgttctatacacataaaaagaagcaacaatcatgaaacaactcaaaatcaaactcaatatttgtgtgattaaagaacgtttactacgttcttttttacaaaagattaaaaaatattcaccgattaaaacaactaaaaaagctacaccaattccaattaaatatgtcattggaataaactgaacattataagccatcaccattaataaaaccattgtaataaattgaatgcttataacaattcttcgtaaatacttattatcaaaaactttcataaattcacttccttctttgtaagagtatcatatttttatccttttagcaaataatcttttatatttgacaattttcacattgagatgaataacttatgaacagcttatttgatttttgtaagaaaatcatgtagaatgactacaatataaagggaggtgccttatgttaaatacaattattgattatatagatttacgtggtgatctttctccaattcaatttccctataatgaaattgacagtttaatatttagtgaattagcctatgtgaatttagatacgatcatcgatctagattggcatcatcctttaactttaaaagatgctttctcactttacgaaaaaagaaatcaagaattaagtgaagaagaattacgacctattttaattgaaagtcatgaattatttgaaaagatggcccatagtccgcgttatcaaaatattcaaatcctgagttatgttaatgatattgataaaaacttaattaaacaattttctgccatgactttattattagaagatcaaagactggtggttgcttatcgtggaactgatgattctttgattggttggcatgaagattttttaatgttatgtgaaaacgttgtaccagctcaagtttcatcggttgaatatttagagtatgttgcttcctttcaatcatcacatagcttgttatcttcacttcaaaataaatatttagataaatcattatggcaacgtttaaaaaaacattttcaatatcaaaagaaacgtccgatttggttggttggacattctaaaggtggtaatttagcaatgtatgccggatgtttttgtcaaaaagaaactaagcaaagaattttaaagattgataattttgatggtcctggttttcaagatgaaattatgttgtcatctgaatataaagaaatgttacctagaattcatagttatattcctcattattctttctttggaattgttttaggacatgaagaagaatatacagttgttcatagtcattttactggaatgctgcaacataatggattttcttgggatattggtccttatcattttaaagaagatgagctttcttatgaaagtgttcaatttgcgattaaagtgatcttgtttttagaaaagctcagtgatgaagaaaaacatcagtttgttgaatccatgtttggattatttgattctttaaatctttatacattttctgatttatcgcatatttcttataaacatattttaaatgcgattaaagagttaaccttacttgatgctaaaactagaaaaatgcttatagaagttttacacatgttatggttagaagccaagaaaacaaaaaaagcgtaagtgtacgctttttttagttccataaataatccataaaaatttgtagctgttgtccccatgattcttcattatgttttccatgaacatatagatagggataggtctttacattcttatttgtataaagataggaaagctctaaataacgggatgtggcataggcaagtcctgttttattacgtgattcatcacttccccagctcataaagatttttgtattttcatccatttgagaatcttgagcatctttctttaataattcaaaacctactccaatagatggtgacaaacaagcagctttagaaaaataacgattataacaacttacagcatataaagccattaatccccccattgaacatccagcaatcattgttgcatcacgtgatacatctgttcgataatgttcatctatataaggctttaattcatagacaatccattttatcagctgatctccttcaccttttatttcacctagtaaagaatgattaacataataaggacaatattctattaatcgtctattttcttcatgattacattcaatacccacaacaatcatcttttgtgaatattgatttaaaaatttttccatattcaatgatttaccataagtcgcatcataatcagaaaataaattatgaccatcaaacatataaatcactggatataattcatgactttgttgatattcttgtggtaaataaagatgaattgttgttgagatttgaaagggcgttatgtatattttaaatttttttatcattaataaacatcttcatcataaacttcataagatgtttttaagaattcataattatctaataagaattcattagcatcatctacatcaaagtcctctaaaataaaatcatcttcattcaatcccatctcactaacgactcttaaaaattcttcttgattttcataataaagttctaacaattgatgttcatcttcccaaattccataaccttcaccagctaaaacctttaaatcatctaatgattgaatatcattatgttcatcaacatccataacatgaatatcaaagaaataatcatcgccaaagtcataccataaaaccaaatgacttccttcatgcaatgataaatcagcaattgtcatatctgctgcataaccatcaatcatttcaccatcacattgatcacatccatattttccttcatcactaataaaagtaaataaatgttcaccttcagcattcatactcgctaaaatcaaataagccaaatcagctaacaccataccataaggcaccttaatcacacgattaacattcttttcaagacctcttaattcaattcttaaagacattgtctttttcatatctggtatatgtttaacaaaatgatccagattttctaacaataaaccttcaaataaatcatcgtcaaattctaattgactcatacataatgtcatcgataacataatcgcttttttggttaaatctacagatgaatcatgagcttcttcctctaattgcttcaaaacattcatcaactcaggtgaagccccttccatcacatcttcataaatatcatttacacaatctaatatatgttctaatagcatatctctacacctcctaattccattttacatgtttttaaaataattcatagaaatttgtatcatcttcaagaaattcatcataattttgtctattttcttactcataatttgctataatttctcataataaagcaaactttgtcaaataaacatgaaagatgtatgtttacttattcgtaaaatatcataaatattaaggcacaaaaaaactgatacatcatgtatcagttttttcgactatttaaaatttaacgtggtttgaactgactacacattatcgtgtggtctttttctattctccaatattctagctataattatttatggggtttctatcaatacacgaattattatgttagtgtatatatattaaaatatttagaaagaaaaaaagatggtaacctcaccgaccaaagtttgtttaccatctgttccattagaacaatatgatattaacaaatttaactcctactttcaataaaaatatattttttgagaatcattaccttcaaaaagaatattatgattccatttcatcaattgatcttgactctattgaatgtccttactgtcatgaccatggtttttcgtttcatgcctactatatacgccatatctatatatttggtaaaaaatacaaaattataatcgatatgtagattatcttatcagattattagaaaacaaagaagaacatttagtaaagttttaaagtcattgaaaaggtggctacccccaaaattggagtatccacctttatcaccagttcaattgtttggggtgttatttaccccatgataatctagaccccaataattggagaccacacgttattctagattaccataatttttctttcattttttcatcatcttttcttaattatttagatttttttcattacttctaccaataattaaacaactaaccaaaacaacagtccattttagatagtaatcaactccaattaaatttacaccatttgtcataataaataaagataaggggttttcaatattagtaaaaataagaatataacaaatcattattccaaaactcacaatagacatttttgaaacaactaaggtagaatagaatatacttgttaaaacaactgattgaaacatgagtacaagaataatatcaatcatataaacattatttattgaaatatagatataaattggtaaagttattatatgaaataatatgcacactagataaagaaagtaccattttggtctatggtttaaaatacaatttaattctctcatattcgattgaatagttttttgggacatgaaatattctaaaataatcataataacaaataatattttttgtaacatttcaaatatacttgacttcaaatcataatttaaatatacaaaatccataatcttatatataaaaaatggaaaaactaaaaaataaagaatacctagaattacaatatatacccacttgtccttttttaaattaaaagatataagttctatgtcttttttcatgagtttaaataaacatatgcatcatctaatgtgggttcttctttagtaagaaaatcatattttaggacagtctttgaaactattctaaaaatattattctgattaaacactacatatatttcctctttaatattatcaatatttgaagaatgacaagaataaactttattatccaataattgtaataaatcattaactaatccactataaattaatttcccatcttttaaaaataaaatatatgaacattgtttataaatatcgtcaacaatatgcgtagaaatgataattggaatatcaaaatctaattgattaataatctctctaaactttaaacgttcttgtggatctaatcctgcagttggttcatcaaaaacgagtatatccggttcccccattagtgcttgagcaattccaagtcttctaatcatcccaccagaaagttctttacattttttatctctatcatttgataaatgtgttagctttaaaaccttatctatttctttatttctatcttgcttgggaatctctttaagaatcgcaaaatatttcatttgttcatataaagttaaatctttaaaagcatcaaatgattgaggaagatatccaatattaaatttcatattatcactaatacattcatcatcagctaaatactgaatacttccactcgtcactttatagatccctaaaatcattctaatcaaagttgttttcccactaccattcgctcccatcaatccataaatatgattgctaattttacagttaaaattccttataatttctttcttatttaaagtaatacaagcattttccactatcacctccattattccatctccatttctttagcgatttttttcatataccgttctactcccaattcatttaagtctttatcaaactgttttttaaattctacaacttgacgatatctctcttttaaattttcatcaacattttcctcattataaggccttgttatatattcagaaagaaaatcatttacttgttttataaattcttcatctgaacactgtataaaactttccaatataagcatatctcttaaaacagaattaatatgatcattttgtgttaaataataagagagatatttatcggtagaaatatatccatgattacttactaagatataattatcaaattcacaataaccacctaaatcagtaacttgaattaaagacatagggaaaataataataggtttgctttttaacgatacttgttctttatcaaaaagattactcatatattcagtaagttgttccttatgttcatagatatctttaatataatcattataagaattattttgtaaactcagtggataataattcttaaattgagaatcaattgttttttttatatttcctccaataagtgtaaaactatcactttctccaacataatgtgattcactcttctgactaagattagtaattattggatataatgtatcaatttcaacatcaaattttgcattaactctgttataaggattaaacccaatgaaacttgtacaaggattttgaatctttacaaagatttgtttttttccttccataggataccatgggaaatagccagggagctgtgttgcctgatggttggaataaagtcttgggtgatatccagtataagtaatttttaatttcaattgatcaattggattagctaaacttaaataaatgtaatcaccctcctgggtaaattctattttttgattactcgttaaagtcttaatatgatagccatggtaaagtgttaagacatagtcacttcttttatgttcagaactgattaaaatttctccactagcttccaattgtcttcttatttttactttaagttgatagttagatatatgataatcgatctgattctcttttatatatatatttttaccctgagaaatttgataataattcatatcattatatgaatatctccatgaatcatccgcacgatacatactttgtgggatattaacagcaactaatgataaacatattaatactatttgtaatcctttttttatatgagatagtttactcttatatgcaatataaactgcaactaatatccaaaatatgaatatatatattttaaatacctcattttgaaatccatatagttcatctacagcataaactccatactggtaaaaataagaaaatggtctaattataatttgtatgaagttatctaatagatcaatagtttgtggtttatttattgatgtaaaaagatttataaatggacttgataaaaaaatggtaactactaaaaaaggtaatgcaactttaaaacttcttatcctagatattaggccgataataagagtaaaacatatttgtggcaaaaggatgttcattaagtagtaatttgctataaaattcattaacaaagcatattcattagtaataattgaagcaataaacattcctactatgattactatattataaatgataaatagaatacaaataattaaaacataatagaaataccatccctttttaacatgtatacaatttaacacttcatcgactttttcattccttgccatagtcaaatatacatacgttatactaataaacattaagttaatataaaatatattttttacaaatgtatcaaacatatatagaccatttaatgagatttgtaagtaaatagggaaaacaagacaaataaaacacagtaataaatatatatatttcagtattttattagcaaagaacaattctagatgtaagtttattttttctatcatatttcatcagtacctttctgagagacggtatatcataattcggttctatattaggatgcttataaattcaatacaaaataatatattatctttgaattattgaattgatatagaatacaattcatttaagatctttttaaatgatgcttatttatacccagttaaatacaatatcttgttctaagtgagttctttttatgtaatattaaattcttattttactattaaaccatagaaaaatgattgatccaatatttttagatcttaaacaaacaatttgtgaacaacaactactaaatttttttcattttctttaaaacttctggttcttttccgtggtatgaaccagatctagaagctccactaatcgctcttgccgtcataaacacagacaacagtgagataaatcttaatagtttaactttcatggtttctgatacaagcaataataagtatactgactattaaaataacatatgtaagaatatttgcataatgacttatataagagaatgttataaatcctatgagaatgatgagtgatagaattttatattttctatattcactattttctaattctctatttcttactggactgaatattataaatacaagtattgcaaatatttgaatatataacatccaatgacgataatattgaaatgttataagataaacgataaataatgaaacatgtagactgatacaacgaaagtacgtttgacaatgatatccaccactaaattttcttataatccaaaatgcaagataatagataattgcatcttccaaatgatccattataaacccaatacctaaaataagtagaaaatcaatagtcgttgatatcatgacttcaattccataacgatggacctcaaattcatcattgcatactttcattttaaacatatattgtgttattttattagtcaaatcttgtatcaatatctcacctccctttagtttcattgtaataatttttaaagaaaaagatagatgaaaaggacgttttgtttctatagaggacgttttacatatttcagtcaaaaaacattactgcatgagtaatgttatctgaatttcaaactcttcttgattatgtatgatgttcattacaccttgatatttttttacaattctatttatactttttaaaccaaaaccatgattttgattatctttttgagtgattaactcaggagaatatttctgtggattaactgcattgcctactttaatgtgtaataacatattatcctgcactatatttattctaattataccttcattattattttcaattgcattatctaacacattagacaagagtgtatttaagtcataatcgtgaataaaattaatatcatgaatagaaatgacagattctacttttatattttttgaataagcttctaatattttcccattaattactgtattgagtaatttgttgtgagtagatagtaacgtaggcatactatctacaatatcttttttagaactcatgagttcttgaactctactataatctttttcagttaaataatattgtaataattgataatcatgtttaagatcatgtttagttatttttaattgttcatataaataaagtaatgttttttcattttttatatcttgtttaagtttttcatattcctgttgatctttattcatttgagcaacctttgataaaatgatcaataaccctatcacacaacaaaataacatgacaaatgaaataattaattcaggtatctctatctttaatataagataaacctgcaataaattttgcataataaaatgtagtccaaataaaataattcctataactaagtatatagtttgattataaaagaatattttatttttcatatattttatcaataacaatgccaatataaaatatataatctttcctaaaggatgaataatatctaaatggaatatataattgatcatgacagataaaataattgtaaatgaattaaatacattctctaaacaacatataaaaaataattcatttaaactctcttctacaaatagatacgaaagagaaacattacatattattaaaaatgatgtaagaaagatatcatacatattgaagtaattagataatgtaatgattgttaaattcaatagacatattaaaaaacgatataatcttttttttctattaatatgcacaagtgaagtaagaaaccatgttaacaaaatagattcaaacacattaattattacccattccatattttattacctcgatatctcaaatatgcattaacaaaaggaacttcactatttcgtgtaaatttcaattcatctccatttgatataattattctttttttatcaaacttcagtatatgatcaaaattaataatcgtaaatgaattcaatctataaaaatatttttcatctaataataacattactttttttaaactcatataaattgtataaacgcttgtttgtgtataaatatttattttatttttatttgatattatataaaaaatatcatgttgtaacaattcaatattttgattagcatatgaaatagttatagtagcaaaattatgttgtatagattttatgtgtttcttataaaatgcagttaaatcatcatgaagtttttcttttcggacaaaaaagaaactttcttgtttgtaactatcataaacaaaatcattgagacttgagatatacacaagaactgtatctggataaaggttcaatattttttctccatcttcaaaacttttatctgatcctaacatcacatctaaaaaaacaatattatattgattttgataaaattctagacatgcactaacaaatatatctatttgtgctgatggataaaattttataagtttttcttttaagattaaagcgaactcttgttcatcatctataatcgctatcttcatattatcacatcctttctcttattctaccattttttatacgaaaacaaaaagatgtttttcaacatcttatctattaaatgctaattcaattaattgatctataaggtcacaataagaaaaaagcatcaaacaactattatagttgcttaataccttatttttatttggattatccaagtctgttgtagtattctacgattaatgcttcgttgatttcttggtttaatttagatctttctggtaatctgatatatttaccttcaatcttttcagcatctacttctacaaatccaggtacatgagtttgagcagctaatgcagctttgataacttctaatgatttagaactttctttaacagctacaacgtctccaactttcacttgacaagaagcaatatcagttttaacaccatttaataagatatgtccatggttaactaattgtctagcttgtcttcttgtagtagcgaaacctaatctgtaaacaacattgtctaatcttgattcaagtaaacagaagaagttataatcagtgattccttccattttgcttgctcttttgaatgtgttatggaattgtttttcgttaactccatacatatgtcttactttttgcttttcagctaattgtaaaccatattcagttggtttctttcttttttgcccatgttgccctggagcataaggtctttttgataattctttaccagtttctaatgtagaaaatcctaaacgtcttgattttttccattgtggtcctgtgtaacgtgccattgtgtttcctcctatgattaaacaatatcaataataattcataataggaatactataccgaagaatatgtaatattttcaagtacatatccaaaacttcggtatagttttttcttcggcatagtcactattataccgaattcggtataatagtgatagaggtgtacaattcacatcgaaaaaatattatgatatgacagttggaatgatcagcagttattcaaaaaaagggaatccctgggataacgcatgtatagaatcatttcatgcattaattaaaagggaatggctaaatagaaagaaaatcaatgattatgaagaagcgtatcagatggtatttgaatatatagaagggttttataacacagtaagaattcattcacactgcaattaccaatcaccaaacaattatgaaaaaaactacaattcgaacaaattaaattaaaatttcttacattttagttgtccgaaatcttgacatagtaccacatagttgttttgattgtttcaccatgaaaaagacattcaaagaagatcagccattgttgtttagaagatttactataatacatcaatgtatttcttttcaaagtgaaagtcgctctcttgcagtcatgattatgacatttatatcgttgatcaccaaattggtcaaaaccagcttttgtaatgtgttcacatccacaatcaggacaaacaatatgctgtgattgaatatcatgaatttcttttttgaagaatttatcaaattcctgttcaagatagaaatcatgaaactgagaataaagttcatcaagagatgataaatctaatttcttaaaatcattgataaattgttgaaatagttcgtcattgttagccattgaaggtacctctctttcattagatacttatattatagctgataaaaagagttgatgttttgagagcaattggattaacaccgttatttaggagttaaaaacatttctttgaggatttatttatgcaaaaaaagatccagaacaattattattactaataattattctggatccttttattaagtacccgataaaattttaataagttcgagtaattttcaaatggtacccgaggtcggactcgaaccgacatgacctagatcgcagcattttgagtgctgtgcgtctaccaatttcgccactcgggcataacgaacttgctcatctattatagtatatatttttataaaaatcaatagaaatcgcaattaatttcatgatcgttataaattcctatagcttgtaaataactatatataattgttggtccaacaaatttaaaatttcttttttttaaatcttgagatatctcttgtgaaagttcatcatatgaaggtacatcttttgatgattcataatgatgtttcactggtttaaaattaacataagaccagatatattgatcaaaacttccaaattcttcttgaacttttataaatgctttagcattatgaataatagatttcatctttaatttatttttaatcaattcaggcgtttgcattaattcttgatatttaacttcatcatattgcgcaatctttaaataatcaaagccatcaattgcttgttcatatgccttttctttctttaaaataatttcccagcttaatcccgcctgtaatccttctaatattaacatcttatataattgaacctcatcatgttgtggtattccccaaacatgatcatgatattctcttaattcatcactatatgcccatccacatcttgtcatttttatcaccaatatgattttaacatacttttttgatttacacatccccttttggtttgtataatgataaaaggtgaatatgatgaatgaattatttgaaaaacagatgaaagacatcttaaaagatgaatatgatgattttatgaattctttaactcaacctaatgttaaagcattttatttaaatccacaaaaaaagaacgctattgattatttgaatcatgattatgtgaaacctcatgtggttgttaaagatggatactattttgattatgaacattatcctttagggaaatctccattcttttcatgtgggctattttatatccaagaaccaagtgctatgcttgtttctcattttttagacgtgaaagaagatgactatattttagatatgtgtgctgctccaggtggaaaaacttgtgcagttgctagtcgtttatctcagcaaggtcttatgattgctaatgatattgtttctttgcgggcaaaaattctttccgagaatgttgaaagatttgctttacaaaatacgattgtaaccaattgtgatcctttgcaattgactaagactctccctggtttctttgataagattattttggatgcaccttgtagtggtgagggaatgtttagaaaaaatgatcaggcgattgaaacatggtcaatagaaaaggtcaatgaatgtgcatatattcaaagacaattgttagatgtagctatgttattattaaaacctggaggacaattgatttattcaacttgtacttataataccattgaaaatgaacaacaaattcaatatcttttagatcaatatgattgttccttaattcctcttaaaaagagtcatggtatgatgccaggaatcgatatggaggaagcaattcgtttatatcctcatcattatcaaggtgaaggccattttattgccttgattcaaaaacatggtgaagctgctactacaaaagtaaaagccttaaaaccaactatctcaaaacaaaatcaaaagttagtacaagacttttactcacaatacctcaatctcaaagccccacaatatctctacgataacaacaatcatatctatgccctacttccccaatttcctgaactcaaaggaataagagttctaagaaacggtttatatttaggggaatgtaagaaaaatcgctttgaaccaagtcttgctttagccttgactttacatcatgaggatgttaaacaatcatatactttccatgaaaatgatttaaaggttagacaatatttgcatggtgaagcaatagaaggcagcaatcagaaaggttatggtgtgatttttgttgaagattatccactttctttctataaagaaagtcaacatcaggcaaaaaatctttatccaaaggggttaagacgatgaatcgatatcaaaacttaaaagatattttctttcaaacaattgaagaaaaatgtcatggtatttataaacaaaaagcttattttcatagcttacaagtcagtacactcactcaagaatttgccttaaaaaaacaccttgatatagagttagcaagtatcattggtttattccatgattatgctcagtttatcaatcattcttcatttgatcatgccagtcgtagcagtcaaatgcttttacccttgcttgaagatttcaatgaagaagaaaaaaaaatcattactaatgcaattaaaaatcatagtgataaagaacgcattgatgatgtttattgtgaaattttaaaagatgctgatgtgttagcacaatatttggctgaacctgatataattttaaaagcgagttatcaaaaaagattaaatctttatgtaaaataaaagcacttcattgtgaagtgtttttattttaacatatcttctaatgcttcataaggcataaatcccatttgacgagaaactggttgcccatttttgaatacaattaatgttggaatagattgaacaccaaattgcatagctaaagcattttcttgatcaacatcgacttttaaaactttagcttctggatgttcatcagctaatttttcaacacttggagctaacattttgcatggtccacaccaagttgcaaagaaatccacaaaaaccaaatcactgttggcaacaacgtcattaaattcactactattaacatgtaatacgtttgacatatatatcatcctttctacttcttcaatttgtctatattgagtctatcatagagtatgcattttcgcaactcatgtgcacctcaaattattatatccaaatatccgcttgtttatgagctccgatttcaaaatgatatttaataataccgagattaatctttgcataactgccatgacttgatatttcaacatgttcatctttaagcgttaaaaagaacttctgttgattcattgctgttggcgctaacatgacagcctccatccctttgatgaaccaatctgtaggttcatcaagacatgtataaagtttttcgattggcatatttttatgtggtttccctaaattgtccccataaccaatagtgattatacaaatgagttcttcttgatcattgatttgacaaggaacttttttacgattataggttgctgctacccaacaagtatttaatcccatctgttgagcttttaaaacaagactttcaccataatatccaattttttcttgatcatcttgatgacctactaaagcaatataattttgtacatttttaaatcttccataatgaacaaagaaactttcaaaagcatgtggttcatttaagatcagctggaaatgtaaatgatgttgttgattgatttgatctatttcttgataaagctgttcaaccttatcttgttcaatcgctttcttttgataatgacgaacagaatgacgggcattcatagcttcaataatatccattgttttcctcttttctatttcaattgatcttttaaatttaacaatgcggcaaatggtgaatcatcaactgacatttgtgttgctttcttttgtttttgtaaatatttcttaacatcacttttaccagcagtttgctttctttcttcacgttctttttgaaatgccttcataccaatacgatatccacatgttttacaaacaaacatttgtttatcccctttacctaccagttccaatttcttatgacactgaggacagcgtgcattggtaataactgacagggtttcacggtaatgacactcacgtgatgaacatactaacatcttaccttttttaccattcacttctaataatggctctccacattcaggacatttcttatgagtcatattatcatgtttaaattgaccttcactcttttcaatttcatcaatgatacgaactgtatattgtctgatctctttaataaattcttgagagtgtagttttctttgcgctattttagataattgcaattcccatctagccgtcagttctggcgaacgaagatcctcaggtacaagggacaataattgtctccctttatgcgtgacatgaatatcttgaccatgtttttcaattagaaaagtattaaacaatttctcaataatatcagcacgagtcgctaccgttcctagtccacctgtctgaattaatgtctgattcaatttttggttagaatgattcataaaacgaactggattttccattgctgataaaagtgttgcttcattaaaataagccggtggctgagtttgaccatttgttttgatgatatcagcaatatcaagtttatctcctacttgaacaattggtaataactgttcatcatcttgcatatcatagacttctttccagcctttcaccttttctcttttccatttagcaatgaatgtttcatgacctaaatgagcagtcaaagttgtttgttcatattcataaggtggtaacaaaacagctaagaatctttttaaaactaactcatatatttttaattcactttcattcaattcacctaaataagctgtttgttctgtaggaataattgcatggtgatcactgactttactgttattaacaaaatgtgcttgttttttgatgggttgagataagatcttttgaatcacttgatcatgatttccacctaatgaagcttctaaacgttcttttaaagttggaacaatatcatctgttaaataacgggaatcggttcttggataagttaataatttatgatattcatatagactttgcataattgataatgtttcttttgctgaatagccatatattttatttgcatctctttgtaattcagttaaatcatataattgtggagaatatttctttttggatgtttttgtaacatcactgacttgaaaagattgattttcattatcttgtatgatttgatcaatttgtttttcatcaaataaataagtttcattcttcaaaccatgccatgtccaatgaatatctgatgttttcacttgaataccataaaaatcctgaggtttgaaatgacgaattttatcttcttgtaaagcaatcatggcaagggttggtgtttgtacacgtccacaagcaagttgcgcattatatttacaggttaaagctcgagttgcattgatgccaacaagccaatcagcaacactacgactatatgcactataaaataaaggttcataggcctttgcatcttttaaatgagcaaagccatcacgaatagctttatctgtaactgatgaaatccatagacgttttaaaggtttttgaaccccagccttttgaataatccatctagcaactagttctccttcccttcccgcatctgttgcgatgacaatttgagaaacatcttttcttaacatttgtgctttcacactttgatattgcttattcgtctttttaataacaactaatttcatatttttaggcataataggaagatcttctatcttccagcttttataattttgatcataattttctggatcagctaaagttacaagatgtcctaatgcccaagtcacaatatattgattaccttctaaagctccattgattttcttatgacaatttaaaactctcgcgatatccttacctactgatggtttttctgctaaaactaatatttttgacatatcttctactcactttctcttatataagcagtctatcatagctatccatctttatcaataaagaaaaaggtctactgaccttaatccatttcaatagcccctgtatataattgataatatttctttttctctttcattaatgattgatgattaccactttcaataatacgacctaattccaataccataatacaatcactatttttaattgttgataaacggtgagcaataaccaaagtcgtacgtccctgcatcaatttatccattccatcttgaactaatttttcagttcttgaatcaattgaagatgttgcttcatcaagaattaagactggtggattagcaactgccgctcttgcaatagctaataattgacgctgtccttgagataaattacttccatcacccgacaacattgtctgataaccatcaggtaaatgtttaataaacgtatcagcattagctaatgaagcagcagctatacattcttcatcagtcgcatctaaacgaccataacgaatattatccataattgttcccgtaaataaatgagtatcttgtaaaaccactcctaatgattttcttaaatcatcttttttaatcaatttaatatcaataccatcatacgtaatcgttcctttttgaatatcatagaaacgattaattaaattagtaattgtggtctttccagctccagtcgccccaacaaaagcaatcttttcaccaggtgcagcaaacacattgagatcatgtaaaaccatacgatcatcaaaataaccaaaatcaacattttcaagacgaatgtcacctttcatctcaaccaattcaatttcaccatttgtacgaggatggcgccatgcccaatgtcctgtacgctttaatgtttcttgcatttgaccatcaacatactctacccgacaaagcgttacaatcccttgatcatcttcacttttttgatcaagtaaatcaaagatacgttttgctccagcttgagccatagccacactgttaatctgctgagagatttgtccaattggctgattgaagtttttattcaaggttagaaaagaaaccaatgtcccaattgtaattccaacaactccactaattgataaaatcgctccaataacagcacaaataatataagagaaatttccaatttgaattgttactggcattaaaatattcgcaaatttatttgctttataagcactatttcttaaatcattattaatatttctaaaatcctcaatcgctttttcttcatgattaaagactttcacaactttttgaccagaaatcatttcttcaatatatccattaacacgaccaatatcattttgttgtttaacaaaataatgtcccgataaactcccgatttttcgtgatacatataccataacacataacataacaagactgatacatgttaaagttatacttaatgttaacatagaaataaagactgtgataatggtaatgcaacttgatgttaattgtggaatagattgactgattaattgtcttaaggtatcaatatcattcgtatagacagacatcacatcaccatgcgaagtacgatcaaaataagcaattggtaataattccatatgttcaaataattcaattcttaaatgtcttaaaaatccttgtgtgacattaaccataatcctactaaatgcataagcacatataactcccatcataaagaaagctgcaactcttatcaaagcataaaacaaaccagtaaaatcaggattaggttgaccaattaaaggtgtaatataatgatcaattaaagtttgcataaataatgttccttgaaccgttgcatacgcattagcaataatacaaagaaaaacaataattaaatgaattttatattctttccataacatttttaataatcttttcattagtcatcctccttccctttcttttgtgtttcatagatattttgataaatatcatttgtttttaataattcttcatgggttgcaaaaccatctacaacaccatcatttaatacaataatacgatcggcttgttcaacactggaaatacgttgagaaataataatcttagttgtatcgggaatatgcttagcaaaagattgttgaatacttgcatcagttgctgtatcaaccgcactcgttgaatcatcaagaattaaaatctttggtttctttaacaatgctctagcgatacataaacgttgcttttgaccacctgaaacattagaaccaccttgttcaatataagtattataaccatcttcaaaacgttcaataaactcatcagcacaagccaaacgacaagcctgttgacattcttctaaagttgcattttcatttccccatcttagattctgtaagattgttccactaaataaaacattcttttgtaaaacaacggaaacctcatctcttaaaacctcaagatcataatttctaacatcaactccagcaacctcaacacaacctttatcaacatcataaagacgactaatcaaactaactaaactgctcttagcactcccagttccaccaataataccaattgtttcaccactttcaatatgcagatcaatatctcttaaaactggttcttgacttccatgttgataagaaaatgtaacatgatgaaaataaatctctccatttttaacagttttaatcgcattttccggtgatacaagatctgacttttcattaatgacttcactaatacgtcttgctgatgcgagtgacattgtaatcataacaaaagccatagataacatcatcaaagacatcataatattcattgtataactaaataaactggttaattccccagttgttaaacttccaccaacaatgctttttgctcctaaccaagataaaagcaagatacagctatatactgaaagcatcatagcgggactattaaaagccaaaacactctctgcttttacaaataatcgatatatattttgcgcagctctcttgaatttttcatcttcatatttttctcttacaaatgatttaacaacacgaatacccacaacattttcttggacactttcatttaaatcatcatatttaggaaaaacatcattgaaatatttcattgccattcgcatgataattccaaggacacagaccaagaaaataactgcgacaacgaataccatacttaattttggattaatcatcaatgccattgataaagcacaaatcaaaaccaatggtgaacgaatacatatcctaattaacatttgataagcattttgaacattcgttacatccgttgttaaacgtgtaaccaaacctgctgtactatatttatcaatattagagaaagaaaatgtttgaatatgtgtatacatcttatctcttaaatttgccgccaaacccgttgatgctctggcggcaaattttcctgccaggaaacctaatgaaagtgttccaatcgcaataataaacatcaagattccataatgaatgacttcattcatattctttccttcaattcctttatcaattaaaccagccattaataatggaattaaaatttccataaaaacttcaatagatgcaaagacaattgtcaatatagaatcttttttatattgtttaatttctttcattaaagtcttaatcataatttcacccctttacataaagtacgtaaccaaactgtttgtatacgaactatatattgaataaaaaatcaggttaccctgattatagcccttttctgatattatcaattaatttatcagaaatcttaataaacgtttcaatttcttcttgagataatccttcaattaattgattatggatttgttccatattgtatgacatccttttattaaactctcgacttagatcggttaaaacaattttcttcaaacgtgcatcatgagcaaccggaactctttgaatcattccttttttacacataagctttaacatttcagaagttgttgaacgattaatagaaaattcagactcaatatctttttgaaaagtatctacacccaattcttctcgttcatctaaaaaacctataatccatgtatgcattagtgttgctcgatcaggacgatgtccaaattttttatccattgttcttttcatcaaattgttcaatgttttaatacgatgtcctacaggatcacgatacattttatcacctcattgttcggttacgaacatatcataacataattctttaaaaatgtaaagaccattcaaaatcttttatcttcgttgacatctcacatacaagcttcatcaagacatccttcttccataatcgctaacgctaattgaataagattatcttcatcagcttttttcattgcccctttgattgtcacatttcctaaatcacccatattcttcattgtacttgtgatatctttcatagttcttgtagcacatggtgcccatgaaccattttcaatataagcaactggacgattttggaaattcttattttttaaatgatgtaagaaatcatccattggagcaaagactccgccatcataacttgatgcagctaataccaatcgatcataacaaaaagcatcccctatcacttctgaaatatcttcatgacataaatttcttaaaataactttctctccgtgtttttctaattctgcttttaaaaactgagcagctgcatatgtatgtccatgaattgatgcacaaacaatcaataccccagattcttcactttgataagaactccataattgataataacgtaaatattgcattaagttttcttttaaaactggtccatgtaatggacaaatggtttcaatatctagacctttaagcttctttaaaacattttgaacttgtaatccatatttccctacaatatttgaataataacgtcttgcttcttcaacccaaggattttgatcatcattaaaggtaccaaaagcatcagcactaaaaacaagttttgcctcaacaagataactcatcataacctctggccaatgaaccattggtgccatcataaactgtaatgtataacgtcctaaagataatgtatccccttctttaacttgaatacgtttgatctgactatctaaacaaaaaaattggtcaatcatctggaatgttttcatattcccgacaatttgaatatttggatatttctcagctaaaacttgaatacatgctccatgatctggttccatatgcgaaacaaccaaataatcaggctctctatcttttaatacttcttcaatattttccatccagatatcttgtgctcttttatcaactgtatccataataacaattttctcatcttttattacataagaattatatgtaactccttgctttaatggatattgtccctcaaataaatctaaagcttgatcattaacaccaacataataaatatctttacctatctccatatttttcacctctatgctattttactccttgtttaagatgatatcaaagaaagtgctcaaaagaaaagagattgcttcgcaatctcttaaacagttacttttacagttgttccatctggtcctggagtttcattcaagtaagaaacaattttttctcttgtttcttgattacttacgacacatccagaaaccttagttgtttccccttcaactaaagcatttgcaaatcctgaacatcctgggtatccacatccaccacagtttgctccaggaagcatttcaatgacttcagtaacacggttatcttcttcaacaacaagatatttattggcaattcctaaaacacatccaagaactgcaccaatcgcaactaatgccaaaactgcactaatgttcatctttgtcttcctcctcatgatgagcactatgatgagtacaagcaatattgttgcaaccaccacattcactcatatcttcacacccctctggtttaggagtatgtttattcattaaataagttccaataaagacagccaccaatgcagccatccatacaaatgcccaaatgctcattagacaagacctgcgattccggcaatagcacatgccataatcccagcagtaattaatgcaattggtgttcctttaaaactttcaggaacgttcgcaatatctaatctttctctaattgttgcaaagacataaataacaattgtaaatccaataggtactgcaagtccagcaactgctgcttcaattaagttatatccagcactgatattatctaatgcaacccctaataccgcacagtttgttgtaattaatggtaaataaacacccattgctttataaatgtcaggacttgttttctttaagaacatttcaacgaattgaactaaagaagcaataactaagataaaagtaattaaatctaaataagtaatttctaatggtaccaatacatagttataaagtaaccaagttacaatagaagctacaaaaataacaaatgtaacagcataacccatatttaaagcattcttaggtttcttagaaaccccaagtaatggacaaacagcatagaatttacttaaaacaacgttattaacaaaagttaacccaataaataaacttactaattccatcctatttcacctccgcattctttgctttcttttcttttctaacttttaagaattgaataaaagcaaggatacaacctaaagtaataaatgcacctgcaggttgagtaaataatgaaacagcatattcactaaaagcactaaattggaaaatcacttgacttgcatcaaatggattaaataaagataatccaccagttccaattaattctctaaagaatgaaatcactaaaactgcaaatgtataacctagacccattcctaaagcatctaagaatgaatcaacaacaccatttttagaagcaaagctttcagctctccctaaaataatacagttaacaacgatcaatggaatgaatacccctaaagactcatataaagcaggtgtatatgcattcataatcatttgtacacatttaactagtgttgcaataataacgatgaaaacaggaattctgatttcatttggaataatatttcttaataatgaaataatcacattactcataattaagacacaaataactgccatccccatccctaacgcatttgttagtgatgtcgtaattgctaaggctgaacatagacctaacaataagacaaagattgggttttcaataaataaaccttttttaaaaatatcaaactttttcatctatgttccctccttatttaaaattttcttcataatgttgagttgcttgttcaattccatcaacaactgctgaagatgaaatagttgcaccacttattgtatcaatactatcgccaatattcttaccaacgataccatctttaaatggttgatctttaacttttgaaccaaagccatttgtttcaccactggcatcaataacttcataacctttataagttccatctttatctaaagcaataagataaacgattggtgtacttgctccaccataaccagtaacactacatttataaacataacctttaacactaccaccactacttgcttcataaacagcttgtaaagcaggataatctgaaagatttgtttcaacagctttgaattcttcaccagaagtataaatcttcactaaattttctttttcactagcaatttttgcttcttgaatcactggatcagtcatttcatacactgatgataaggctgctcctgaaagtccagcaacgactgcaaggaaaagagctaattttaatattttcatagatgttcctccttattttgttgctgcaattgcttttttaattgcagtaacaattcctttcgttgtcattgttgcaccagtttttgtatcaactccatcaatatcagcaaaaccaaattcacttgctaagtatttgtcatagaaagcttttcctttttctgttgctactggagttccatgaactaattcagcaccatagtattctgtttcaccagatgcatcaataaattcaatctttttcacaacttgttttgctttatctacagtaatcttgattttcattggttgatcagcattgtatccaacttcactcattgtataaacataagtgtcacctttgacttcacgatctaattgagacatgataatagcacccttaattgcattaacgataccttttgttgtcattgtcgcaccagtctttgtatcaataccatcaacttcgcttgttttaaattcaccagttaaatacttatcatggaatgctttacctttttcagttgctacttctgttccatgaacaatttcagaaccataatattctgtttcaccaggagcttctaagactttaacagatttaactgtgtcaccagatactttaacttcaattttcattggttgatcagcattatatccagttgtttccataacaaaaccaccatcaacttctttaacaaccttccaattgaaagcatttgcttcttcttcagcttttttcttttcagcttcttcttttttcttcgcatcagcagcagcttttgcttcagccgcagcaatatcgctttggatactatatccagcaccataaacgcaaccaatagacacacctaaacaaatagcaattgtagcccattgttttgcaattcttgtatttgttctacctaaaataaatgaatcaattaatggtgttaacatattcatcaataagatagagaataaaacaccttcaggataattcgcttttaaacgaataatcattgttaaaaatcctagtccaataccataaacaatcttaccaagtggacttgtcggcgatgtcaccggatctgttgccatgaaaatggctccaaatgctaccccaccaatacataaatgcatcactggataagttgctaaatcaagaccattcattaatgcataaacaccacttaaaataagaatagttcctaaataagctactggaattcttgcatcataaacttttctaaaagctaaaacaattccaactaataaaattaaccagatacaagtttcacctaaagttccaccatgatttcctgtaattaaatccatcaatgtgtaactaaaatcagttccacccatccaatgagtaccagcaagcattgtagctggtgttgctgttgatgtcacatcaacaatcccttgaacaccacccattccttcaacatatggtaataatttatcaccaaatgataaatgaacaagaacacgtccaactaatgctgggttaaaaatgttttgaccaaatccaccaaaaactaattttcctaagaaaatagaaataaatgaaccaatcgcaacaacatataaaggtgtaccaataggtaaagtcaaagcaaaaataattgcggttacccaaggaaacccattttttatttgttctaatacatttgttttatggataagtccccacactgcttcagttgcaactcccacaacaattgaaaccacataaataagtgctgccgcaatcaatggttcatttgttgggtagttataatagaaatgatataaagaatatgcaacaatcaccaataatccgattgttaaatctctcataatacgatgtgtagagagtttttgtctatagtttggtgacgttctttgtaaagtaatcttcattaattttcaccctccctacgctttctttctcttttgtgcaagttgataacgacgttttgcttttgctaccatgtctgtcacttcaatcttacttggacatacataagtacacataccacattcaatacaacgatcaacttccaatttttcaattaattcaacattagctgctttttcaccttgcataatacgtacaggttgtaaatgagcaggacaatgtaaagtacattcaccacattttaaacatggtaaaggtttaatatcttcttttttcatgactgtaatagcattgttatgactataaataacaaatgtatcattcatgactgatttacccatcattggtccaccaccaactaagaatccatcacaatcttcatcaatataaccaccaagtttttcaacaatatagttaactggtgttccaattgcaacttcaacgttttgtggattttttaatccatttccagagaaagtgacaacacggtgagtaattggttcaccttttctaatacctttagataaagcaattgctgttgatgagttattaacaataacaccaatttcagcaggtaatttatcatattcttttttaaagacagtattcactaaaactctttcccatcccattggataacgatcaggtacttcacgtggttcaatgttatcatagttctttgcttcttcaactaataattccattaaatcaggtttatgttctttaatcgcaataatcgcattcttagctccagcagctttgattaagaagtgagccccatcaaataaagctttaacatctcttttcatcgcaagatgatcacttgttaaaaatggttcacattctaccccattaatcaagattgtttcaatatttgttggattgctatatttcacataagtagggaatcctgatcctcctaatccaacaatacctaattctttaatggcattaaagacttcttcttgactcatatggtcagcatctttgacttcataagcttttactctttcgttcttatggtcattttcaatgacgatatgctgctgtaatctttttgaagcatgcatacgtttttcaattcccttaacagttcccgaaacagaagaataaattggcacatacatactcttacgagtagccaactttgtacctatacaaacatgatctccttcttttacatggacatcaaaatctgttgctgttcctaaaacaaggggaatataaacaacatctggtgcttcaatagacaagattggtttatcttttgttaaacctttttgtccatctagtttaatttttccttttccagataaaattgacattgtatccctccatatcttattttattcctcaccattataacattatcttttcattttgggaaccttttcacaacctaatttctaaattagaaaataaaaaaaatgtattttccaacaagtttttatcatttatccaataactgtaaagaaaagaagttattttcttcaaataacttcttttttctcaataacaaccgcttctccacaaataaagacacgagatttttcgccaacttccatatgtacatttaaaatagcatttgcccctattttcattgcctttttcatcaagacacgttgcgcttctaaaacactatcttcaatagttctagtcagcatcatcttatcatcataagcataaataagtcccaaatcttctttgacttgataatctaaataatatggtaaagccgaaacaatcatttttgttacctcctttatttattttgttatatcataagcaacacataaaaagatattgggaccctataactttaaaaagtcatataacttgattttataaagttactatgatagagtgaaaatgtagacaaaggaggtcgtacatatgaaacattatgatgctattattattggatttggaaaaggtggtaaaactcttgcaatagagtttgctaaacgtggtaagaaagttgcaatgattgaaaaatctcaggaaatgtatggtggaacttgtataaatgaaggatgtattccttcaaaatcattaattgttcaagctcatcaaaaaacatatcaagaagctattttacaaaaagagaaattggttcatcaattacgtcaaaagaattatgataaattgaatcaatttaataatattgatattattgatggaacagcacgctttgttaatgatcatcaagttgaaattattgatcaagaaacgattgaaggtgattatatctttatcaatactggttcaacaccaattgttcctcatatcaaaggaatcaatgaaactaaacatatctataacagtgccacaatgatgaaagaagaaaaacttccacaacatttagccattattggtggtggttatattggtttagagtttgccagtatgtatgcaagatatggcagcaaggttacagtgtttgaatacaatgaacgtttagtaatgcgtgaagatgaagatgttgctttagaaattcaacatatcttagaaaatcaaggggttcaatttaaattttcaagtcgagttcaagaagtcagcaatcaaaatgaaaaagtaatcattcaatactctcaaaatgatgttggttatattgatcattttgatgctgtattgcttgcagctggacgcattgccaatactgatgaacttggtttagaaaacactggtgtaaaagtggatcaaagaggtcaagtaattgttaatgattatttacaaactgatgttcctcacatttatgccatgggtgatgtcaaaggtggactgcaattcacatatatttctttagatgattaccgtattgtcaaagatcatctttttggcaaacaagaacgtactgtcaataatcgtggatatattccttactcagtttttatctcacctacattttcacgtgttgggttaagtgaacaagaagccttacaacaagattatgaaataaaagtcgcaaaaattccaactgcttctattcctcgtgctaatgtcgatggaaaaccagaaggtgttttaaaagccattattgataaaaatactgatcaaatattaggatgtgtccttctttgtgaacgtagtgaagaaatgattaattttgttgaacttgcgatgaatcaaaatttaacatatcaagatgtagccaatcacatctttactcatccatctatgagtgaagctcttaacgatctctttaatgctgtacaatagagatagaatttttatcacaaaaagggtataatgaatctataaaatttttgtaaatgagggatgccgtttgaaaaaacaatatgatatagaatgtaatatagctcaaactttaaatttaattggtgataaatggacacttttaattctccatgctatccaatcaggatatacaacatataaagaattgcaagaaaacctacctggtattccgactaatcttttatccaatcgtttaaagactttatgtgaagatgatttattgaaatgtgaactttactctcaacatccaccacgttatcaatattctttaacagataaaagtaaagatcttgatgatatctacaatgccctcattatttggggtgatcgtcatttatcaagaagctacaaatgcctaaaacataaggattgtgatggacagattcaaatcgtgtatgtttgtcaaaaatgtggtaaacaactcacgaaagatgaattgattgttcataatcattcaaattaaaaaagccattactggctttttttatattctccacataatctttttctcatcttgaagattctttaaacatttaaaatatatataaagaacaaatcatacaaataattctattctaaataagctttaatcactattttcttttgagtttaactattgtttcaatcttagcactataaggatatgtatctaatggaatcattgtttcaatatcatagtatttctttaaatcttctaaattcttagctaatgctgaaggatgatcacttacaaaaataacatctttcaccttagataagattaaactttgttgaatcgctaatgataattcttcacatcttgcaatcacaacatcaaattttctttttttacattgcgcaattgtcgcttcatcaatatttttacataaaaattcaacatcactcttatgtaagaatttcgcattatccttagcatctttaatatgataattcttttcatcaatagcaacaacttcattatcaattgctaattctaataaaccaataccacaatttaatgaaagaactgtagcctgtgcaggaatcattgaacgaatgatttctaactttgttttttccatttctggattgattggaaattctgatttcactgaataaagatattgttgatcaaagcaatgaaatggtaatgttgattgtccatagactttcttatatccttgtaattcaaattcttgatgtcttgttgtattgattgtaaaccaaatacttttgacttcttcaatctgacttattttttcaacaatttctggttttaacccatcttgtccagtaacaaataatacttgaatttgtccatcaatatttcttaatcttaaaaaacgtaatccttttttcactttatcattataatctcttgctttacattcatttaaaatatcttcaatttttactaagcattgattaataagcggatcttgcataggacaattattcattaaagttaagtatttagattctctttgataaatcccaacattcacttttcctttaaaataagtaattggtaaagatacaactttacgatatcctttactaacttgacatgctcttacatgttgaattggtaaatgatcaacatcaaattcagtatacttttttaaagcatcttttagaattccttttttaaaaggagcatgttgctgatagtcaagtgcagttaaagaacaaccttgacaattcttatcttctttacaaatagactctacacgatcttttgacttttgaatataagacacaactttcccttttaaaaactttctattttcttcaacaatttcaacatcaacaatttcattaggcaaagcattattaataaaacaaattttcttattaatatatccaattccctctccattgattcctaactttttaatctctacacgttcttttctcatcttctattctccttaagtgtaaaatatttgtaatgtacattcctatataaaagatctctgccgcccaatcaaagacaaataatatcataacaataaatgctaatggaccataaactgattcaaaatcagcaaaacgaaaataaatatttaaaccataatataaaaccaacatcaaagcactggcaactaatgccccttgaaaagcatcactataatgaatccgaattcttggtacaatcaaataaatactcatcaaacaaaaaaccaataagaaatataagataatatgcctaatgccaaaaaaacgatataaaaaatcaaaaatataggccaaaggtccaagtgctaacacagcaataattccaataaaaatcagcaatataaaaatagtgatcttaaaagtataaatataatagccaataatactttcttcaatatcttgatgatacatattttttgaaacttcgtaaatattaccaacgcctcttgaaacagtataaactgatacaatcattgtaatgagggcaactgtattaacagatttagattctaaaacatctattaacatggatgaatattgaggcataatgacttgactaataattttttcaatgatatccatattaatattaaataacgatgttacaactgcaactaatgaaaatgctggtattaaaatcaaaatcaaataaaatgataaggctgctgctgcatacggtggtacaacagaacgataatcatcataaatatctacacatttttcataaagtgccttcacaatttgataccctcccattgattaagaaaggaaaaacattaatcatgcttttcctctacttcatcatcttcactttcttcttcatttaaaagttctaatttcaacgatacaattctattcttatcaatttcttgaattgttaataaaacattatcaatttttaagacttgatttaattctggacttccattacattgtcctaaaacaagaccaccaatggattcaaaatcttcagaagaaaactttgttccacaagtttcattcacttcatcaatatttaaacttccatcaatttgataaattccttcttccaattcaacaattgaattttcaacttcatcatattcatcatcaatttcaccaacaatttcttcaacaatatcctcaagtgttacaattccactcataaccccatattcatctaagacaatcgctaatgaaacatgttctttacgcatagcttcaaagacatcagaaatatgattaaattcataaacaacaaatgtctcacgcataaactctttcacatcaaatttagacttaacaaccttcgataacattaaatccttaatatgcaagactcctataatttcatcatatgattctgaatgaacaggaattcgcgaaaattgactttctttgaaagttttcatcaaatcattataagaaacatcatcaccaacactaacaacatggattcttggagtcatgatttccttaatttcagtttcaccaaattcaaacacattatgaatcatttctttttcttcatcttccaagacaccttcttcatgagaaactgtcacaatcgtttttaaatcttcttctgtcatcgttggtccattatcactatctccacctaacaaatgaataaagacactagaaatcacatttaacaccgcaacaacaggtgtacatataattgttacaagtttaataaaacgacaaactccaaaagaaatcgattcagcatttttggttgctaatgatttaggtgtaatttccccaaatattaaaatagccaaagtgacaatcccagttgcaatcgcaacccctgtcccttcattaccaaaaatagaaatcacaaacgaagttgttaatgatgaagcaccaatattaaccaagttattacccactaatattgagcttaataaacgatcttgatcatcaagtaaagcatcaacaatcttggctttcttattatcatcttcttcagctaatgttctgactctgattttattgactgccataaacgcagtctcactcatcgaaaacaacgctgacatagcaattaataaaataaataaaaaaatcataactatctgactcgagtccatctataaaaattctccttatatctaaatttattcaatattaatataaaatgaaagaattgtcaaattcttcatacgattacatatataatagtataatcaatttttatgatttatcaataacaaaaataattttaggaggaaatatgcgaaaaattgccataacattacgaaaaaaggatgataatatgaccttctttatgaatcaaacctattttctttggttattaccatattttgatattgaacttgttgttcctagaggtaatcaccaatataaagatattgttgaacgtaatgatttattattgatttgtggcggtaatgatatcaacccattttattatcaccaaaaaaatcatccctcaaacacaatagaagatccattaatagaaactatggattttgccttattacaacaattctatcatgctcataaacctattattggaatttgccgagggattcaagtcatcaatgtcttttttaaaggaaccctctttcaagatatcccttcaatttctcaagtcgtcaatcattctcatacccatcatcaaataaaagttttagacaagacttttttagcaaaatatttttctccccaatcccaagtcaattctttccaccaccaaaacattgataatgtttcaccattatttcatatcaatgcaatcagtgaagatggttttattgaaggcattgaaaatcatcaaattattgctgttcaatggcatccagaaagaatggataagaactatcaagaaacatttattcatatgattattgattttattgatcaaaacaaaacatctgatgattaattctcagatgttttttcttcttgatgacttaaaacttccatcaattgtttatgttgttttcttctttgtacaagaaataagattggaaaagttacactacatgcagctataattcctaaaaaagccataattaatgtttgattaatgagttccatacttccacttccttttgtgaaagtattataacatagttttaccaataagcaaaacagataagagaatgtcttatctgttagctctattataataatgattgataaagttctttgatttcttcaacacttgtttctctagggtttcctggacgacaagcatctgcataagctgattcacttaagaaatctaaatcttccgctttaacaatatcttttaagtcagttggaataccaacatcttgagataatttttttactgcatcaatagctgcttgacgatatgtttcttgatccataccagttgtatcaactcccatagcttcagcaatatctttatattttgttcctgttgcaggagcattgtaggccataactgttggtaagataatcgcattagcaacaccatgaggtgtatcatataaagctcctaaaggatgagccattgagtgaacaattcctaatccaacattagagaatcccattccagcaatatattgacctaatgccatgccttctctaccttcaggtgtattttcaactgctcctcttaaatgtttagcaattaattcaatagcttttaaatggaacatatcactcatttcccaagctccagctgtaatataaccttcaattgcatgagttaatgcatccataccagttgcagcagttaatcctttaggcatagatgacatcatatctggatcaacaaatgcaacgattggtaaatcatgaggatctacacataccattttacgatctttttgagcatcagtaatcacatagttaattgttacttcagcagcagttccagcagttgttggtacagctaagattggtgtacaaggattcttagtatcagccaccccttcaagacttctgacatcagcaaattcagggtttttatcaataattccaatcgctttagcagtatccattgaagaacctccaccaattgcaatcatataatcagctttcgcatcttgtaaaaattttacaccatgttgaacattttcaattgttggattggctttaatatcagaataaatcacatattctaaaccagcttcatctaataaatcagtcactttttttgtcacaccaaatttaatcaaatcaggatcagaacataccattgctttatgaaatcctcttgctttcacttcattagggatttcttgaattgctccacttccatgataacttgtttcatttaaaataaatctgtttgccataatatttttttcctccatttgtgaatttctataaatttattttagattcttgtgaaaataaaaacaagtgacaaacacttccatttgtcacttttcaaattcattatttgtttgcaagagttatttgacaacgttttttataaaatgcaatgccttaaccaattgcttttctatgttcatcattttctattcctattggtatctttttcatgatgatatgcctttcattttcttatattatactactttattcagtacaagaaacatataactttcatttcaataataagtttttttacatatctttacaatctattctttttctatcgctattgtgccattctaatatctaaaaccttaatagataatttagaaaaacagttaaaaataactatataaaaattattttaatctaactaatttgtatatcataatatttctattgtttaagccagatattcattttctaaaatcattctttcttttcatcttcaaaaggttctaatcccatttcttcccaagttataccatacgctgctccaccgctcgtatatccagcaatataataaaagtattcattctgttcaatagcttccatctcctgatgatttctgtttttctttttaatttgcctttcctcatgtttttttagccttcttttttctttttcaatttcttctagtgtaagttgaacacctaaactctgtaattcatcaatagcttttaaaccatccaccttaaatttttttctataacttctaatcatattcactgattcatctttattaatttcatttatccaagctatagccatcactttttgttttgaaaacgattttgttatcgtaaatccgataacaaatcttctaattttggtggtaaagcatcaattaataaatcagcaatcatttcaggtgattctttcatccctcgaattgcccattcaacagtcatagtaatagaaccatgacaatacattttaagcaaaaacataatatcttctggaatatcaccaattttattatggataatttgtttataaaattctaagatacattgataatcataattttcaacattgttatagtctttagattgaaaagcctgcataaaaaagatctgatcatttaacaagaatgtaaacttcttaactaacccttcttttaatgttgatgaattaccaatttgacgaaaagatttatcagctagtttttcaaaataccaattaaccaaatcatatttatcttgaaaataacgataaaaagtttgtcttgtcatcccactatgcttaacaatatcagtcactgttattttatctaaaggttgttttgccattaaatctttaatactttgagcaaaaatatattttgtttgatcatgttcattcatccccattcacccctttttcccattataaaagaaatcaaaatatgtgacaagaaaaaagtagcctgttggctactctccatgacatatttggcattttccttgtttttttgcactatacaaataatgatcacatctttcaatcaattcatgaatagtttcatcctgaatggttgcgatgcctaaactcaaatgaactgaatcatgaaatgtctcaagtaatatcttttgattatcaaaagcttctttaatatttttggcaatttcaatggcttcattatagttagattgaggtaaaatgactaaaaactcatctcccccaaaacgacatggtaacatattggtataaataagatgttgaatattctttaaaatatttccaacataaacaatgacttcatcaccgacattatgaccatacgtatcattaataactttaaaatcatctaaatctaaaagaataattgaaaagtcttgtttatttttttgatattcattatataatgagtttaattgtgctcgaataaaacgtttattatataaaccactcaatgcatcctgagtgttttcaatcgttaattcttgattaagttttgtcagtaacgtattcttttcaatattctctcttacaattgatacatcttgtgacacatcttctgtcacaacaaaaactcctacacattctttttgagcattcaaaagcggatatttacgtgtatgggctactttagtataacctcttgcatcctgtccttcagtttcaaatatatgcaatggtttcttagtttttataacattttgttcatcttcataggcttgtttagcatgctttggaaaaagaggaaataaatcaaaatcagtttttccaatgactgaatctggttgatctttaaattcaggatgttttgagtaaaattgttgattaacataaagaatacgactatgaatatctttaaatacaaaaacatatggcatatctgatgttacaattgcttctagaacttgatttgcgtctattcctaaacgttgcatgatttcttgaaactccatttttatcacctgcctttattgtaatcgctttctatataaaagtaaatatgtttatcaactttacttatttgaaaagcgtcacatattatatttcttattgtcatatttatgcaaatttgttaaaataagaccattaggaggcatagagcatgaaatttattaaaaaatttgcaaaagaattaagtgtctttgggttagttcttgttgtttttttaggtctttttctttatcgtcaagctacatttaaagattataaaacaatcaagaaatctgaactcactcaaatggttgaggataaaaaagactttgttgttgtattaggtgattcaagtgatgcaacagttcaaggttatcaatctatcatgacacaatatacaactaaaaatcgtaagacacctttctactatttagatacaaaagattttgataatttagaaaaatatgtagaaaagacttttaaaacaaatgtaacttatcctacaacttttattattaaaaaaggtgaagttgttgcccaaaaagaaggtagcttacaatattattcattatatgattttatcagagaaaacttttcataacatgaacactaataagagttaaaaaaatgttgcgatataaattatcacaacatttttattattgactaacataaattttatctaagactggttcataaatacgttcaacacgttcactaattaaacaaacaatttcatatggaatggtatcaagttcttttgccatttgtgacaaaggaatatgttctccaaagatttcaactaaatcatgtaaggcaacagattcatccactttgaccatcacttgatccatgcatacacgtccaacaattggataatagtgtccattaatataaacctttcttccttgattagcacgaacaaaaccatcggcataaccaataggcagtgtagcaatgtattcatcctcatccgcctgataagtaaagccataaccaatatgttcacctttatgcacttttttaaccatgacaactttactataaagtgacattacctgctttaactgtggacattcatcacccgctggatccactccatacatagcaattccgattcttgcaatatttgaacgtgtttcatgatgatacatcatggaagcagagttttgacaatggatatatttaaactgatgatcacctaatatttcataaaacattgataattgattttcataggctgctttttgtaaatcatcatctgctgttgcaaaatgagtaaagacaccatcaatttgaaaaatatcagttgaacaaagttttaaaactttttcaaattcctctttgcttttcaaaccaattcgattcattccagtatcaatagcaatatgcactttgataggtttttgatgatgaaacagactttgtatttctttcatataatctaatgaaaataaagaaagactaatatcatatttcacaactttatctaaattttctaaaggaatagcgcctaatactaagatatcttgttgaatccctaattttcttaaatcaattgcttcttttaaagttgctactccaaacattgaaatatgtgggttttcttttaaactattcgcaacttctttatatccatgaccataagcattggctttaataatagccatcattggttttttaactttttgatataacgtattcacattatcttttaaataatctaattgaattcgtgcatacgtatcacgataatgtgtcacaataacaccccttttcaatgttctagtatagtccattcatcttcctttttcaagaaaaaatagggattcatccctatttcacatttgttgcctgcatacttgataaaactgataacatttcttcttttgttaaatcattagaatataatgaacaaacaattcccgaagatacatatgtcatttgattgtcatcttgaaaagcaatcccatcaactaaatcaatcatatctccactaattgtttgaacactcatagcatcttgtttagaaagagcactttcaataattgtaaaagatttctcacccgtgaattttaaaatatgatttgttgtattatcaatttgtgaaactttttcattttctaatgtagatcccatcaaagcaactggataaagcggtaaagctgaagatgcactggtatattgattttgcgtttgtttcataattgtctcttgagcaaattgatctttctttaaatcttgattcactttaaaagaactagctgttaatttgataacttctgttccatctttatcataaacattcacatagattggttttaagttcttatcaaacttcacttcttgggttttaacacgatcatcattttcataagccatatttccattgactaaatatccatctttgactttttccggtttattatcttttaaaaatgataataatgattgatagatgtatggtttaggcgaattgtttggccattcgcttttaaattggaaagcttgatttaatgaaggtgttaagacaaatacaccatcgtcatttctcacaatgacttgagcttgatttaaagatttatcatagagttcaaccttataataatctttttcaccaatatgagcaaatgttgaagtgacctgataagattttaactcatcattttctaacatttccatattacaaaccaattcatagcttttataagcattcgcttcttttaaaactttatctaatgatgaaggtttaaatttaaaaaaacaaaagataccaatgagtaagaccaccacaccagcaataatcgcaatatatttcttattcatcattcttcctcctcgacacattttatgaataattacaaattttatgaataaagaaacaatctttggttatactatcactaggaggagttaattatgaacatgatacaaaaaatagctttagtctttacaattattggtgctatcaactggggcttgattggattatttaattttaaccttgttgaagccatttttggaaattcattgttaagtgctattatttatatggttgtcggaattgccggaattattaatattatgttattattcactgacttagatcgtggataaagaaaagttatcgtatttatacggtaacttttttatttacaggatatttttgagcattcttgatcatcttatctaaaataatttctttgatatcaacatcaagatgaatagctagttgaatactataaatcataacatctgctaattcttcacaaacatgaacgatatcatgttcatcatcccattggaaacattctaataattcagctgcttcaataataattgattttgaaagattatcagcactatgatattgatgccaatccctctgagttacaaaatcatcaatgacactaaccaataattctaattgatcacttggtttttgaacattgtattcaaacatttcactataacgaatacctgattcttcacgatgtaaagaggtaattccagtaaaatagaaaccatttttttgatataaataacgtgctggcaagttattttcagtaatatccaaacgtaatgcaagacacccttttaaaatggcttcttttttaatccattttaacatttgacttgcatatcccttatgttgatagagtgggtcaatagctaaggtatggataactaaaacctgttcatctctagcttgaatttgccactgagcattttcataaccagaatcttgttgatgatttaagatgacacttccaacaaccataccattgattttgtatatatacatttcttgattgtcaatggcttcataggctgattcttctgtgggatataagcctttaggccatttgggataattaatagttgtcataaaagcttcatgaatatgttcatagattgcacttatgctttttaaatcatccattgttgctaatttaaattctacttcttccattttttcctccataagaaaaagacggataccgtctcattcttcaaattctacgatttgtccagtttttaataaaattctttttttatgttttactagtgacaacattggtaaatctgaacgagaatctgaataaccataagattgttcataatcaatttctaaatgttgagcttttaaacaagctaaaatacgattgattttttcttcccctttgcagtttttcccaataatttcacttgtttcatgttgattttttcttaatgtttttgtacctaataaacaatcaataggtaattcattatatcgcatataagcttcacaagaagctgtacataaaattacaaaatacccttcttgttgtttttgtctcatttcttcaacaacatgtgaataataagttggaacaacttcattttgataaaaagcttttaattgttcatcactcattccatcaattggaaataaaattgctgattttgctttttcaaatgaaatcaaatgaagtaaaaacaataaatataaaatacctactttgataaaatacaaagcatgccaaggatgatgtttaagatcatgcttcaataacaaagcaatagaatcacccctagcaacagtattatcaaagtcaaataaagcaactttttgtaacattaagcaatctccaaagcaatttccatcattgcagtaaatgttttttctctttcttctggtgttgtttgttcatcagtcaccaaagaatcagaaacagttaataaagttaaagcttttttaccaagacgagctgcagttgcaaaaagggcataagattccatttcaacccctaaacagcccattgaagcccacttttgtgttgttccttgatcaaagtgatagaaaatatctgatgctatgatattaccaacatgataattcacatttttctcttttgcatgagtcacagctttttctaataaatcatatgaactaatagctgaatatgttcctggtaattcaaattggtgagcaaagttgctatcagtacaagctccttgtgcaataataacatctcttaaatgcacattctcaacaagagccccacatgaaccaatacgaataatggcttcgacaccatattgactaaataactcatgtgaataaatcccaattgatggttgacccatccctgaacccataatagaaactttcttacctttataagttcctgtatagcctaacatatttcttactgcattgaattgatgcacatcttctaaatatgtttcagctaaaaatttggcacgcaaaggatctcctggcattaaaactgtttgagcaatttctcctacttgcgcttgattgtgtggtgttgacataataaatttcctccttaatgaaatgtctttccttcctgaaaataataaacatcattcaaatctgatggtatttgacgatgctgcaaggcatcatcaatagcttcaatcatgagttgatcttcatcaatttcataaccaaattttgcaaagtatccatctaaaacaataaatggtacacttcctgaattttcatcagcataataatcttctaataagctacatgtctttgcataagcttcaattgaagattcttcatctatatccattttcgttattttcattgaactgccatatttttcttcaagttgaggaatgactgtttcaataaaagaacggcaaactggacaagtttttgcataataaacatataaatagtattgtggcgttttgtcacaaccgcttaatactaacaaaacaaccaataataattttttcatttatgactccttatataagaatctcagacctccaagctcttgtcctaattcttgatgaagaactgccttttcaatatcttctactaaatattcttcatctccagaagtatatcctagttttgcaaaatatccttcaactgcataaaatggtccattaccatataatgattcatcaaaatcagataatgaatcaatgaccttatcataaataggcgcagttgcatcatcatccaaatcatattgatcaattgtcaacgaatcaccaaatgtcttttctaaataaggtatcgcttcttttttaaaagctttacattcactacatgtatcaatataaaagaacaaaagtgtaacatgttgttttaaagtcttggtaggcacagattcacagccccataaaaataggattgataataatatgactaattttttcttcatctttttctcctttttatctattataaactatcttgatttgattgtatacctcacacttttaataaatttatctaattttgttgcaaaaaaataattttaataatataatggtattaaggagggtgaaagaatgaactttgaatggtcaacaaatgatattgcaacaatgactctaacaatttatgaaacaaatttaactcttaataaagctgcatgtacacattttgaagatgtcaattatgttttattaggggttgataaaagtgctagacaaattggaattaaacctgtttcaaaacaagagatagatgatcagatttatccagaaagtcaacttcatcggatttctcttggtaaaagttatgggcgaatttccaataaatcgtttgtttatgacctcagtcaggaatttggattagattttgaaaacaaccaatgttataagtataaagtcacatatgatgtagtgcactcaattatgattgcacaactgtgagggagggaaatcaatgtcaattacttttatttggacgcttgtcctagtgatttcagttattgtcgaagcgattaccattgaccttgttagtatttggtttggtattggagcaattgctgctttaattggtgagttctttggtttaagtccttttattcaaatggtcttatttacaattgtttcaattatttgtattattgtttcacgaccacttgctaaaaaatatttaagaggaaatacagtaaaaaccaatctagatcgtgttattggtaaacattgtctagttactgaaacaattactgccgataataaaggtgaagtcaaagtgatgggaactttatggagtgcaacaagcttagataacgaatttatcaaagctggtgaatatgcagaagttatttctattgaaggtgctcatcttattgttaaaaaaataaatacgggagatgatagattatgttagattttatagtgaattatttatggcttgtgattttaattttattagctattattgtgattgcaagaacaattcgtattgttcctcaatcttatgcttatgttgttgaaagaattggtgcttataaccgtacatgtaatgttggtttacacattcttattcctttattggatagaattgccaacaaagtctctttaaaagaacaagttatggactttgctccacaacctgttattactaaagataatgtaacaatgcaaattgatacagttgtctatttccaaattactgatcctagattatttacttacggtgttgttagaccattaaatgcaattgaaaacttaactgcaacaactttacgtaatattattggtgaccttgaattagatgaaactttgacttcaagagatattatcaattcaagaatgcgttctattcttgatgaagcaacagatccttggggaattaaaattcatcgtgtggaagttaaaaatattattccaccacgtgatattcaagaagccatggaaaaacaaatgcgtgcagaacgtgaaagacgtgaagctatcttacaagctgaaggtaagaaaacagctgcaattttaactgctgaaggtaaaaaagaatctatgattcttgaagcaagtgctgaaaaagaagcacaaattgctcgtgctgaaggtgaagctgaagcattaagattagtttatgaagcgcaagctaaaggtattgaatatatcaattcggcttctccaaaacaagcttatgttacattagaaggtttcaaagctttagagaaattagctgaaggtgaagcaactaagattattattcctagtgaattacaaggtttagctagtgctgtcacttcaattgccgaaattgccagagatcctaaaaaagaaaagtaaagaaattgatggtttatcattttgataaaccatctttttttgttataatgaagaagaaggtgattctatgaatgaaaaaggaacaagcttttctataatgtttatttatattgctatggttgtgattggaagttcttcattgattgatttatcgcgttctttttcctttttctatattttaaaattgattattgattgtattttacttggaggctattatcttttaattaaagagaaaaagattggttttcttattatgtggttatgtattccaatattaatcttactcatcggtttatctttaagctttcatcaagttataactattatcttttcatatgagtttcttttgaatattgctgtcacattaacaatttttccaaagttaaaaaatatgaaataaaaaatctgtaacgttttatatgttacagaatttttttatttatgcttagaatatccacttgccccactatattcacaatcaaccaattgaacatcaggtaaatgacaagtatgacgctctttttctaccaattgttttacaaaatcagatgctggatgagctaaaagttcatgaggtgtatcatattgttgaataactcctttatcaatgaccaaaacttttgtcccaagtttcaaagcctctgaaatatcatgagtaacaaataagattgtaattcccgttttttcatagatttgttttaattcaatctgtaattgtccacgagtaatttcatccactgcaccaaaaggttcatccatcaaaaggatatctggtgaagcagctaaagctctagcaattccaaccctttgttgttgaccaccagaaagttctaaaggataacgttcttttaattcttcatcaagtccaacgattttcatccacttagaaacagctaaatgtgttttttctttatcttttttattaagtaaatgagggacataggaaatattttgttcgactgtcatatgaggaaacaaaacactcccttgaattgcataaccaatatgacgacgcaattcagtgagatttttatcatgaatattttcaccttccactaaaatatccccactcgttggttcaattaatccattaatcattttcaaagctgttgtttttccacaacccgatgagccaatgattgtcacaaactctcctttttcaactataagattgaaatcttcaagtacaactttatcaccataagcttttttaatatttttaaattcaataattgtttccattatttacacctcacttcaaaagattcttcttttgtaaaaagtctttagcaacatctcttggttctttactatccgtttcaacctcataattcatttgagccatatcttgatcagtaatgagtccagataatttcttaaaaatattagataattcaggatgtttcttgataacttcattacgtacaacatttccacacatataagatggataaaagtttttatcatcctttaacacggtaatatttgaaacactgagttgtccatcagttgtaaaaataaccatagcatcaatttttccttgattaatagcttgatatttcaaaccaatatccatatccattgttttcttaaaatgcaaatcataagtttgacatagtgcattatacccatcttcacgttcaaagaaatcatattcagcaccaaaaatcaattgatttgcgacggtttttaaatctgaatatgtcttaagatgatatttctcagcaatttcacgacgaacaaccaagccaaatgtattattaaaaccatacatccccatccacttcatatctaaagattgattatactcatcttgcatagaatcaaataaatcctcagtataaattccatctttttttaaaaccatattccatcccgttccagtatattcaggataaagatcaaattctccactttccatagctggttgaatattagatgttcctccaccaaccccttgagttaattctacatttaaatttgtatcttgctcaatcaagagtttaagcatttcacctaatacatattgttctgtcattggtttcgtcgcaatatgaattatatcttgtttttttcttgaaaccactgtcccaataacaatcacaatacataatcctatacaaaccaatgccatcactttatttgcttttttatctttaatactacgcttgttcatacgtttttcaataaatcctagaagcatatccataactaatgctaatagggcaatcaataaacttccaaccatcgtcatagctgtattattggtcgtgattcctcgataaatagctactcctaaaccacctgcaccaataaacgaagcaatccctgctaaagcaattgtcattgtcaccatattgcgaataccagatatgataattggcattgccaaaggtaatttgatttttaaaagaatctgtaattttgtactccccattcctttggctgcttctaaaagaacgggatcaacattcgtaatcccagtatgagtattccttaccattggtagtaaagcataaacagttaaagcgatgacggctgtcgcatttcctattcccgaaaaaggaatgagaaaacctaacattgaaatagaaggaattgtatataagaaattaatgaatcctaaagttggtttcgatgttttttgaaattcactaatcaaaattcccactaaaccacctattaaaacagcaatcccaatagcaagtaaagaaatttctaaatgttcccataataaacttaaaaagaaatccttacgttctataaaaatcgaccacatattttctaacatgtttatccacctcttttaacaattgccttcactggacattcttcataacataacccacaatgtaaacaatgcgtttgtgaaatgacaaagtctttaatacattgttgtggacaaatacgttcacacttaccacaatgaatacaatcttcattaataatgaaacctttttgttgataatcatcatttcctagaataaaagactctcttacaattggctctttacctaaatcaaaaaattcaccttcaccctgctcaatacagaaagcctcaagaatatatcgactttcaccaggatacacctgattcatacttggattttctttaaaaatacgatcaatccattctttttgttgggataatctataaatgacaccatttaatctaatcatttgaaaggcttgattcattcctgtgattgcaacattttcattttgtatcaattgctgataaaaagctttacctctagcagtacaaaaatataatttttcattttccacaatcatgacatcaataatacgtacttgcggtttcccattttcatctacagtcgcaaaagcaacatctttgatttcacgtaatatatctaaatatttttgagctttcattttgagtcctccattcgttgtaatcttctttattacaattcgattgtagcacgcagtcgttgtaatgtcaacagttacatcattatcaataaaaaaacctatattcacgatataggtcattgattctctttttgtatatatgttcgtgtatctttcaaaaaatcagctaatgtcatttgacgcatttcatcttccatggctttttgaatacagtccaatctgccatccaaaacgtgatgaatattttttcctacaggacaagcttcattgggattttcatgaaaatgaaacaattctccatgatctacacattctaccgcatgatagatatctaaaaaagtaatttcatcaagtggtttagcaattgcagcccctccgcttcctctcgttactgtaatcagcttagccgcttttaattgttgtaataatcttctaatcacaacaggattgacattcacacttgaagccaaaaactcacttgttagtttgtgatctttttcaaaagtgtcaatacacgcaaatatatggatagccatcgtaaatcgacttgaaatctgcatatcaaaacactccctccaactcttattttcatatcaagtatagcataagttcgatgtacaagcaagtgttacaacactttcaaaaagattcatttttggcataaagaaaaaccctcttacaagggttactctttagtaaaaataaaacttaccccaacttcttgattaactgctttcacatcataactaaacatcgaagcaattttacttacaattgataatcctaaaccaaattgtcctttgactcctttgacatatggatcaaataagaaaggtaaagtttcttcatcaatatgatcaccatcattatatatctctagatacttatcttttaaagtaatatgaatttggctttttgcataacgtgttgcattttcaataatattttcaatagcgacacgccaatgttcttcatctccaacaaaacaaacatcttctaaatctgcttgtaaagaaatttctggttttaaagcatccatttgtaaaacaatcttttcaataagttgtttcatttcaaatgttcctaattcattattttcaccttgtagataatccaaacgatttaaatataaaaatgacttcactttatgttctaaacgattagcattttctaaaataacatccattgaactattcttatctccataaggataaatatcatctttaacactttgtccatatgtttgaatcaatgcaattggggtctttaaatcatgtgaaatattatgaatcatttcttccttaatactttcttgtttatccaaatcttctttcatttcaaccaaggctttagaaacaattccaatctcatcaccacgatcaatatttaattcacttttctttctatttttaatatcatcaatataattcttaattttttgtaaaggcgtaattaaagttaatacccaaacaatcatcactaatgcaaaaatgacaaagaaaccatattgaatataaataatttgatttcttaaagaatgaattaaatcagatgaataatcactattaacaatagaaattaaatattttgaagaattattatattttgtaatcatataataataagtttcatcaccatattgtcctttatctttaattgtctcttgattagaatttacaatcttatctaaatcatcaccaaataaatgactgtataaagtcataacaacatcttgagataagttaaaatcaataaacatattttgttttttatcataaataatatgatatgttggtttactttgtttatttggcatataggaatcattaatgactgaatattgtgatatcactaatgtttcatacatttgcttatcaataatagaacttaaattataatcaaccaaaggcattaaaacagcaaccaataataaaccgacaaaacttaaaacaacaatcaattgctgaacaagagacagtctttttaagaattgaaactttgataattttgctttcatattaatctaatcgatatccaaatccatagattgttttaatatttaaatctggcattttctttcttaaacgacgaagtgtatcatcaacaacacgatcactaccaaaataattttcatcccaaaccttagataaaacttgttctcttgaaatagcaatacctttattcttaataaaatacaataataattcatattctttagtcgttaattcaatttctttattatttgataaaaccttacgtttttcttcatcaatcgcataaccatcaatattaatcaaagacggatcatctttataaacacgttttaaaacattatgaattcttaaaatcacttctttaatattaaatggtttcgtaatatattcatcacagcctttttctaatccaataatacgatcaaactcctgatctctcgcactcataaaaacaattggcatattaggtttacaatttttaatttcatttaacaaatcgaacccactatttttatccaacataatatccacaatccataaatggacatcatcatctttatgtaataaagcttcttcatacgtataaaaagaataaacaatatatccttctttttctaaataagttcttactaaatcatttaaattcttttcatcatcaataatattaatacgatacttcacttttatcacctcactatcactatatacaaaatattgccatataatatggcaatattttgtgataatatgtgaaactgtattatttttctactgcatatcctttttctttaattacattaacgactttaagcacattttcatgacaaacttcatcgctcttagcttcaaccataactcttactactggttctgttccactttcacgaactaagattcttccttcatcacctaataattcttcaacttctttgacagccttttgaacatcaggatcttcttgagcttttttcttatcagtaacacgaacattgattaacaattgtggatagatttcaaccgcttcagttaattgagctaaagtctttttattttctaccattgtttccataatctttaatgatgttaaaataccatcaccagttgttgcatgttttgagaaaataatatgtccagattgttctccaccaatacaatgaccattttgaaccatattttcataaacatatttatccccaacagcagtcttttcatatttaattccagctttatcaagtgatttatataaaccaaagttactcataattgttgtaacaattgtatcattaacaagttcgcctttagctttcatttctaaaccacaaacataaagaattaaatcaccattaacaactctaccaaattcatccacagcaatacatctatcagcatcaccatcatatgcaaaaccaacatctaatccattttcaacaacatatttttgtaagacttcaatatgtgtagaaccacagtttgtattaatatttgttccatcaggttcattattaatcacataagtctgcgcacctaaagcatcaaaaacacttttagcaattgcactagatgaaccattcgcacaatctaaaccaacttttaaatctttaaaagcacgtgtaggaatactcattaaatatccaatataacgatttcttcccattgcaaagtctactgttcttccaatcgcatcttttgtcgcatatggaataggatctgttaatccatcaatatattgttcaattaaattttcaatcgtagcctctaacttatgccccttaccattaataatcttaattccattatcataataaggattatgtgaagctgaaatcataataccacaatcaaattcttcacttctaaccacatatgatacagaaggtgttgttgttacatgtaataaatatgcatctgcaccacttgcggttaacccagcaaccaaagcatattcaaacatatatgaacttcttcttgtatctttcccaattacaattctagctttatgattacgagagtaataccatcctaaatatctcccaacttgaaaagcgtgttctacagttaaatcaatattcgcttctcctctaaaaccgtctgttccaaaatatttacccatttttctaattcctttcaatattaattgtcactttagatgatgataataattcaatcttcaatttctcatcatccactgcaaccttgacatcagccttgttagttccaagttttaatttatcaatatcaatagttgcttgtatattgtcagctgttaaagaagctatcttagcttctgttccagtcactgaaacagaggcatattggctttctccagcaaatgacaccttgtattttctttcattgtttaggacttgaattggtatcttatcaaatttcttagtaataaccttttcaacttcaaccgtcacatcaattgcacttgttgaaaacttattgataccattttccttcttcaatgaaacattactaatggttgtatttgacttaagatttgtaacatcaacatcaacctgtacaaccgcaatatctttaatcttatcttcaacaccataaattgtcacttcactttgtgacaaagtataattagaaacttgatatcccgttgacaaatcaccaataaaatgtgcttgaattgggacactcttactataactagaaacattacatttcacatgtaccttcttaggtgaaatctcaaccttcacttcttttccactattatcatatgctttaatattggcattttgttcaaaagattcttttttatctgtcacatcaatacatgcctcaactttagcaacacgatctagggtttcttgacttgcatgtaaaataactgtctctaaactcatttcttcaacactaactgaatattcactatccatcttatcttcattaataaaacgatatcctaaatcaaagacacgttcttcttttggtgataatttaatcttcactaaatctggaacaatcataacttttaaggtatcagggaaattacgtgattttagattaatcgtatgttctccctcacttaaacctttaacatctaaataaatttcataattttttgaaaaatttgttttataaatatctaatgatggtccaattaaaccaactgttacctgttcaggtactcccgagatttctaatgatttattcaaaccttctatttgcacaggaacattatccaatgttgcccctgaagttggattagctaagttatctttccctccactacttcctgcaatactccaaaataaaacaccagccataatgaaagataaaaccataatactcattttactagataagattttatctaaagttttattaatataattataaaaacgtcctactgtatcaatcgtcttagtcttggttgtattaatattttcttttgttggactattttcatgactggttttttctttttccttttgaacaactttcaaaaagaattcagttgttgaatcatgaatatctttatgatctttttgatgtctaggactcatgtttttgccctccttcatcatcagatttaaaccaattcaattcattaacaagagaagctcttaactccttagtaggaatttttttaagttccccattcatcgcaaatgaaatggttccggtttcttcactaacaacgactgttaatgaatctgttatctcactaatcccaatcgcagctcgatgacgagccccatacttagggcttaattctttatttgttggtgggtaaaatgcggccgcacaaacaacccgatccccttgaataattgttgccccatcatgtaaaggtgtcccttcccaaaagatggttaaaaaaagttcacttttaatatcggcatttatacgtgtaccggtattgatataatctaaaagtgattgggttctttcaaatgtaatcaaagctccagtttgttctttagataaagttgtaatcgcactaaccaactcatccattaatctttctttttcatcatcactgatttctttttttaaggtcatcttcgtttgacccattttttcaagtaaggttctaatttctggttgaaagataataataattgctaaaacaccccaattgataatactttctaccaaataatttaaagttgttaaaccaagtaaactcgttaaaagtttaacaattaaaataaaaagaactcctttaaataattgcattgttttgacatttgttttaaacattgatatcaaataatacaaaataaaccaaactgcaattaaatctattgaacctctaataaagttaacaatatcactccagttaacaatcactatcaatcacctacatttcttttctattataacagttttttcttcaaaataaaatgccacagttttcatataatgaaaaaactcttgttaaattttaacaaaacaaagattttgtacaaaaatagcgcaaattcctttgcaaaatataaaaaaagttgtaatatatttatggaaataggaggattattatgggaaaaacaattttagtcgaaacttctgctagacacgtacatttatctcaagcagatttagaaacattatttggtaaagggtatacattaacaaacaaaaaagatttatctcaaccaggacaatttgcatgtgctgaaaaagttactgttgtaggacctaaaggagaaacaaagatgtctatcttaggaccaactcgtaatgcaactcaagtagaagtatcattaacagatgcaagatcacttggaattaaagcattagtgagagaatctggagatatcgaaggaactgaaggatgtaaattagtaggaccagaaggagaagttgaaatttcttgtggtgtgattgctgctaaacgtcatattcatatgactcctgctgatgctcaagaatttggggttaaagataaagatgttgtcagtgttgaagtgactactgatggacgttcattaacatttggagatgttgtttgtcgtgttagtgatagctatgctttagctatgcacattgatactgatgaatcaaatgctgctggtggacctagtcaaggaacaatcattaaataaaaagagttatattaaaataaccagaagatagaaaatcatttctacttctggtttttatttgtttatccttagttttatctactttcgaagggatgtagagaaattatatgaattttttaaaatataacgtagacaacaaactaaggatatccgacttaatcatacccctatgattattttaaaacagcacctgttttggctgattgaacaagttttgcataacgtcctaatagtcctttttcagcaactctaactaatggtttaaaattcgcacgacgtttttctaattcttcatcactgatttgtaaatggatcatattttgattcaaatccacatgaataatatcaccatcttcaaccaacgctatagttcccccaacagctgcttctgggcaaagataaccaatgcttaatcccccactggccccagaaaaacgaccatctgtaataattccacaatgtgcaatacctttcataatctcagtaatacggtgcaattctttcatacctggcccaccttgaggaccttcataacgtacaatcagggcagtgccttcttgaatttcatgacgatgaaaagcttcataacattcatcttcactattaaacactctagcttttcccgtaaagacatgtaaatctttaggaacagcactggttttgaccaatgccccttctggagctaagttaccatataatacttgaattccattcgtgatagattgttcatcatccatagtacgaataatctcacgatttatctctatcttgcgatttaggttttctgctaatgtcttacctgtacaagtcataacatctttttgtaaagtagattcaatggttttgaggatagctggaactcccccagcctgatataaatcaacacaagttaaatttccattaggaacaatattacatataactgggacttgtgaagtgatatgagcaatttcttcccaagtaacttctaaacctaattcatgagcaagggcaggtaaatgaattaaggcatttaatgatccaccgattgcacttaataatttaattgtattattgagtgcctcttgactcataatatcagatggcttaatattcttttctaccaattccattaaacgaataccgctttctcttgcactaaagcaacgcatactggcacttgatggatataaggcaccattgggcaacatcattcctaatccttcacataaacaacccattgtattggcagttcctaaaaatggacaaaccccaggacctgtataatattttaaagttccttcaataacttcacgttcagtcgcttcaccacgtaagaatctttgtcttaattctttagactcattaggcttaatttcagcataacatggtcccgctgtaacaatgatggaaggtaaattaattcttgcggcagcatttaacataccgggaataatcttatcacagcttgctaaataaacaactccatcaaaaaccccttcaccaataatcatagcttcacatgaatccgttataatatcacgatgtggcaaacaataacgcataccaggatgcccttgagcaatcccatcacacatagcaatagtattaaactcaataggttcaccaccagcttctaaaattcctttttttacttcctcagccaattttttcaaaggttcatggcctggacaaacttcattccaactattcgcaatcgcaatcaatggtcttgattctaaagcatcaatagacactcccgcacttgccaaatgtgcttttgaaatagcacgttgaaatggttctaaacgatcaatagctctttccataatctttcctcctacatgtcttcttcacattctccagcatattcttcaattttctttttaccaacaactttttcgacaaaaaaccaaacagcaatgaagacaataattaagagtggaacaaagacaattggattagatacaaagctttcaaagactaagaaactttgtgttaaagatgtaccagcaaatgatgtaattaaaccatcaaatttcaaaccagttgataatgctaaacctgttaaagcatgagttgttaaagttccagcatataagatagctgccatttgaacaatcccaatcaataaacttctaaacaaattacctcttgtaacagcaacaatcatcgcaaccctaaaagtaataaccgctaaatcagcaaatggtaaaacacgatttcctggtaagatagctgctaaagcaattgtaattggggttaagattaaagcagttgtaataacattttgattaccaacaataactgctgaatctaaaccaatgtataattttctacctttgaatttttcagaagtaaacttcttagcagcttcagaaataggcattaaaccttccatgaataaagaagtcatcttaggaattaaaaccataactgcagccatattgacacctaaatttaagatagctgctaaatcataacgtgctaacaatcctaaaatacatcctaaaatcaaacctaacatgattggttcaccaaagaaccctaaatattttcttgcacttttaatatcaaaattaattttattaacccctggaatatgatcaatgacccaattcaatggagcggcaataatcaatgatgaaactgaagatacagttggcaaagaaacatctggaatcccaaaataatgttcaacaaatggagctgaccaatctgataacttaaaggtaataattgccataatacctgaagctaacaaacctaaagcaacattttcagttacaaagtaaactaagataccaacaattgccatatgatgataattccaaatatcaacatccattgtatctgttaactttaaaattaacataataatattaatcgctaaaatttcaaaaatgatgaaggcaataattggtgaagcccatgtaactgaagcaatagcaccccatccaacatcagtaacatttaaattaatcccaaaattagtaaccattgcctgagcagcaggaccaatatttgttttcaataaattaacaactaaattgataccagcaaaaccaatcgcaattgttaaaccagctttaaatgattttgataacttgactctaaaaactaatccaataattgtaataataactggtaacataaccaatgatccagcatttaagaaaaactgaaagccttggtatattgcatcaaaaaaactattcatatgtagactccttccaaattatcttaaatatcctaatattttttcaaaagttgcttcttcattaattcctgttaacaaagcaatagctccaacaataggtgttgaaacactatcatctttaaactttccagatgtaacaactaaatcaaaatcagcagctttacttgcaacttctagaactttacattgggtaacatgaatcgcaattccttctttttcacatctttctttaatctttgaagcgacaactgtacttgtagcaattccattgccacatgcaactaatacttttttcattcctttttcctcctacagcaaatatttttttattgtttcataaatttctttttgatttgatgaatgaacaattgattttacaacatcttgattttgaatcaaggcaacaactttttgtaacatttcaatatgtccatgtggtaatgtcaatgctagcatgacaactaattgaacatcaatcatcacatctggttcatccattctggcaaattgtgtgggttgttttaacaccccaacacaaattgaaccttgattaacattggctatatcacaatggggaatcgcaacattaatagcttctgtgaataatccggttggataatttttttcacgttctataattgctggataatagctgtctttaacatatcctttgacttgtaattgatcagccattttctttaaaacctcatcgtgatttaatttttcatctataatgagaacttgcgtttcatcaaaatgaatactatccattatttaatcctcccaacttatttgttgaacaaatgctaaaatagacttcttaagattttcttcatttgcatcttcaatatcttttttatcaaaaattcctgaacctattccagcaaatctcgcccccgcatcaaaataatcttgagcatttaacccattgataccacctacaaccatcaatggaatacgacctaatggcgccataacatctttaatatattgtggtgtcaatcttgcagctggaaagacttttacaatatctgcaccattttctaataattcttgaatttcacttggtgtcatggcagctggtacagttataacaccgtgtgcatgacaatagtcaataatttcttttgacaattttactggtgataaaacaaactgggcccccgcttcaacagcttccttcgcttgtgctaaattcataaccgttcctgctccaacacatatgtcttttccaaattcatcagctattttttgaatcgtactcgcagcatcatcactattcatcgtaatctcaacaacttgtaactttgtccctaccatctgtttgacaaccgctctaacactttcataacgataacctcttaaaataactgtgaccttaggaaaactctgattttcttttatcaaatgagtaaccccctttcgtctattattttacttgacaaaagggggttttgattgactaatactgtattaacataaatttttctaaaatatcttcttgacttgtacaaagttttaagatttgcataaacgaaggctctcgcatttgcttatatagctcctcaaaagcttcagtttgatcttcttttaatgccaaagtaaatacaaaatcaacaaagttttcaccatcccaacagacaggtttgtctaattttgtaatgtgaatgactggttttgtaacatattgactttcaccatgaggaatcccaattcctccctgtaaataggttggtaaccaagcttctcttttataaacacttaaaagatagttttcatcaacacaattagcttcaaccatcatagccactgcattatcaataacttcttctttggtataatttcctgaaagaatactaatacattgttgatctaagacttctaataaaggattatagatacctaaatatttataacaataggtctttaaagattcaaaaccttctttttgatagacttgttgtgatgtatagaatggtatatcactgatatgtggatctaaagttcccactattgccataatttcatatttttgattgaggtcttcgattctttccattaaagatgtttcatcaacataacctaaatgaagccatttgacatctttaaaaaccgattcaaaacggacctttaaataattttctaattgaatagctgctccttcaccagtcacacaacaagttaaaatcgctttagctctttcatgaatacgattttgattttgatagatatgtctagtttctttaatgtctaaactttcaacaatctcatcaatcgtttcattcgtccataatgtctttcttaaacattcaatcaccatcaacgtatcacaacgtcctaaaacacctactgctacaccaatttccttttccacacgctcaccaacctgcaatagcgaacccatatcagccaaaataatgcaccctttgccttgatcaatctcatggactttcgcaataaccttatctgccatgatttttggtgaatcagaaaattctaaatccaagccgacggcatgatattcacccataatcatatttgcagtttgagccatagcgctagccacatgaccatgcgatacaaccaaaactgcaatctttttttgattatcatagtagtgactttgaaatttctgaaaataaatagcaagaaaacatgtttcttcttcaggatgttgtacaagtattttcttttgtatattttgaatcatgtttttcgcaattaaatattctttaggattattttgtttgattttattgatttctcttacaaaacgtgctttttgatgaacttgtctttcattcatcatctttaaatgaatagctagtggaaaaatcatagaatcacttaaataaggcaattcttttttagctttatcatatatgtacgaagaaagctctaaaatcgttttcccaacaattgctgaaatttcatctttactcatctttgatttttcaacattatgaatctgtttagataaactcatttccatttcttcaaccaaaacatttccagcttcctgatcacttaatccctgggcttttaattcatcaaatttttcatcaagtaattcataaatatcccatgaatcagtaatatctgaacgagttaagacactatgaccagaagaagcaaaaatcatgtcaccacgaatcagcattcttgtttcacgattatgagcataataagtgctctttaaagcgtcagatagattatcaaaagtcacaatcatactattttcatcactgatttttttatctaataaagctttggcacaagagactttaatttcattttgaacttgctgaaaattatcaggaaaaggataggatagtaaagtataaagcgcttctttttttactgtaatatcatcatttaaacattgactttcattttgaaaacatttttgaatataggcaagtttttctttcattggtctttgttcaaaggaaggaagctgtatcaccattgaaaaatttctttgataatcttctatagctgtatttaaagttgcaataatcatagtagaactcataaagatttctggattatctaatctttgaaattgtcctgtgtttaaatacttcaataacatttcttttccttgaatgggaaaagaatcaatttgatttaaacaaataattccctgattcattgtttctaataaacctgcttgttgttgatatccaaaaagttccactaataactgtttttcattatgtttataatcttgacaatttatctcatggcaataaaaatgttgttgatatctttctaaagtctgcgcatagtttaagacttctttaatgagcgttgattttcctgtccccacttgtccaacatataaacaatgcatcccaaaaggtgggtatatcaaagctgctaaggtacgattaataatgtttttaagacttccatcatagcctatgatgtgagaaaaaataggagttgacgtagttttttgggttttatttaaagttaattcttgacgaattttactgactgcatatttaccaatgacaaagtattgatcatttaatttttttgttagttgacgatcactgatttgtggttgagctttaatgatttgaagaatagctttatgaagttcgctttttcttctttctctagaatctgggatttttaattcttttctaatgtttgttacaatttctcttgataaatctaatatttcagctattttttcatcagtatagggattctttttatcttctgtttcgatacaatgtcgaattaattgtctcgtttgcatcatcttcctccttcctcacaaaaaccgtatgtcatcatacggtttgtaatattcgttgaattttttgagcaaatattttaatttcctcatcattgaaattttgaaaaatatctttatctttttctctttgaattgcaggtgttcttttattcataacttgaagaatcattttttcagtgattgacaagtctggataataaagggctcctccaaccccagcaatcacctgaatatcttttaagatatcaaaagaaaaagcctgcgtaacaaaagtcataaattcactttgcaaaatccctgttacatataaacaataatgcttagaaatcaataattcttgatgattattaataaaatgtacaatatcctcatctaactttccataataaactggagtcccaacaataatcatttgggctctttgtaatgttggataatcaatatcattgatattcatcaaaatacaatctgatagatactgtgataagactttagctattttacgtgttgctccatgttttgttttatatacaatgacattcattttgatcatcctcctatctatagtgtacatgaatttctatcaataagcacgcaatttattctatagatagaaaaaaagtgcttattaagcacttttcatgattattttccgttaataacgttctttaaagcagaactagctttgaatgcaggagctttactagcagcaatagtcattgtttcaccagttcttggattacgcccttctcttgcttctctttgtcttacttcaaaagttccaaatccttttaaagtaattttgtctccagcttttaatccatcagtaatagtttctacaaaagcattgatagcagcttcagcttgagtttttgtcaaaccagcactttcagcaactttttctactaattcagttttgttcattacaatatctccatttctatgtaaatttagggattcaccctatgtagtattataatacaatttacaaatattgtacagttaaaaggatgattatgtgatttataattgtttgataaattcaacaaatttttcaacttccacttttggggttgcccatgaagtgactaaacgaacacgcatttgttgattatctaatggttcaatatgagtgactaaataatgttcttcaatttgagctaaaacatcaagtggtaaatcaacaaagacttgattagtttttgaaggtaaatataaaggatatccttttgctttaaatgcttctcttatataatcagccatttgattttcatgacgtccaatatcttcataaagatggtctttaagtaatgtatagaattgaattcctaaaagtcttcccttagcaagcatggcacctttatgttttaattgataacggaaattttctttaagctcatcatttaaaataacaatggcttcaccaaacattgctcccatctttgttccaccaatatagaaaacatcaacatttttagcaatatcagctaatgaaggagcatcatctaaaactaaggcacttccaagtcttgcaccatctaagaaaagatataaaccattttctttggtaaaagcatgaatatcttctaattcttgttttgtataatatgttcctagttctgtggtttgagaaatataaaccatcttaggttgaaccatatgttcatcaggatgctgtgctaggatttgtttaatcatttcaactgtgaccttaccttcttgatgaggtttcgtaataaccttatgtccagttccttcaacagctgctgtttcatgaacattaatatgtccttcatcacttgcaataacaccttgataatctcttaaggcatgtgaaatcacaactaaatttgcttgcgttcctccaacaagaaaatgaacatcagcagatggttgatttattctttttaaaatcacttctttagctttttgacaataatcatcatttccataaccaactgtttgttcctgatttgattgaatcaaagcttctaaaacttgaggatgtgctccttcactataatcatttaaaaaactatacatatatctctccctactttctatacaataatccgtatcttacataaatcaaatctaataaacttaaaaaattcattgtaccttgcattgatgattcagtataatcactttctgttccatcaatataataagtataatcaataaactcatgatgataatctttattcatcgttaataaaagaatctgtggatgatgttcatgtaatttttcaacaagtgaatcaattaattgttttctcgcacgaacagtaataataataaccagactgtctttatcaatcatatctaatctttgaatttcatcaccacgttctacaaaggcataaataaatttacgaagttttaacattttcatttggaaatcattggaaatgattttattgaattgataaccaatcatatggactttttgagcttgatgaatcatttgacagattttatcaatttcatgaatgttaatactttgatgaactctttgtaatgattgaattgtttcattataaattttatcaacaagatattgaggattttttaagacagctttttcatcttcatcttcaagatgaatttcatctctggcaatttctaaagaaatcgccatttcatttttaaaattcgcaaaattcttacaatttaaatctttacaaaaacgtgaaatagttgctggtgatgtataacaaagatccgccaaatcattaatgctaatatctggaatcttatctaaatgagttaaaatggtatgagcaattgtataatacatatcttgtgatgaggaaacattaacataggacatcaatgtataaaggatatcaacctcattataatttctaattggcatgttgatgctcctttaaatattgggcacgtccttgttcatataaatcattaccatagctatcaatcacaactgttaaaggtaaatctttaacggttaacttacgaatagcttctggtcctaaatcatcaaaagcaatgacctcacatgtttgaatacattgaccaatataggcccctgctccaccaatagctccaaaataaacacctgtatattcttgcattgcttttttaaccgcatcacttcgatatccttttcctatcattccacgtaatcctaaagaaagaagggttggtgcataagcgtccattcttcctgatgttgttggtccaccactcccaaaaacagcaccaggttttgctggagttggtccaacataataaatcacttgattataaacatcaaaaggcaattcttctccagcttctaataaagccactaaacgtttatgcgcagcatcacgtccagtataaatcacgccacttaaaagcacttgatcaccagctcttaaagcaagaacatcgtcttgattcaaaggtgttgttattgatttgatcataaaataacctccttatgtctagccacatgacaacaaatactaacggctactggcattcccgcaatatgcgttggataagtttcaatatttaaagataaagcagttgtctttcccccataaccagcaggtccaattcctgtttgattgattttttctaacaattcttcttctaaagcttgataacgttgatctggatgatgtgttcctatttctcttaacattgcttttttagctaataaagttacacgatcaaaagaacctccaattccaactccaatcaccattggtggacaagcattaggtcccgcatcattaacaacttttaagacaaaatccttcacaccttgaacaccatcactcggttttaacatttttacctgactcatattttcactaccaaaaccttttggagcaacaataattttaagttgatccccttcgacaatctcataatgaataatagccggtgtattatctttagtattgatacgatcaaacattggatcatccacaacgcttttacgcaaatatccttcttgatacccttggcgaacaccttcatgaatagcctcatttaaagagccttgaacatgaacatcttgacctatttcaacaaaaacacaagccattcccgtatcttgacaaataggcgatgatgtacaacttgcaattgaggcatttttatttaaaacttctaaagtttgttgtccaatcaatgaatcttcttttgtatatgcatcttgcaaagccttttgtacatccattggtaaaacataatttgcttccatgcacaatctttttacttctttaataattgtttcttgacatatttctttcattttctacccctctttgttaggtctattatatataattttatatccaagaacaagaaaagaattaaaggatatgtccctttaattcttgaatagaaggataatataatgaataatagcgaagtgacaacaattcaactgctgtcaacaaactatgtttccccgtttttttgtttttagccggtcctaataagattgtatgatcaaccggaatctttatatctaaatcgggattacaagttatcaaaacaactttacaacctgatttttttatatattgtaatgtcttaaaaccactcccagtaaaatatccattaacagttaaaataatggctacactatcacttgttaactctttagcacattctaactgacgtgaagaatccatataagccattgtaaacttttctaacattagtaaatcagtttggaagtgaagggcggcactttgagaaaactgtgttccaaaaaaggcaacactttgactatcatgaattaattttaaagttgcgtccgcttctttccaatctaacattttaggtaattctgagatatattcaatcactttatcaacatattgttgagtcgcaagtgatggattggttttcattgtttctaaaggaatattaattaaatttgtaaactttttatcatttgaatgaaaagtataacattcttgttttaaatgagcaaaattttcataccccaatgctcgacaaaaacgtgaaattgtcgctggggatacaaaacattcagctgctagctcactaatacgcatatcagcaatacgataaaaattatttgccatgaaccaggctatattataattggtatcattttcctgagcagtatctaaaaaaataattaatctataaaataaatttttcataacacctctcctttattttcttttatattcacctgatacatcaaatcctaaaggactttctcctttgatttctttgacaaagatagaatgaccttgctttcttatttcaacagcataaccaattttttcatcttttgcaataaaagtctgattagaaatttccttcacatcaagataatcaccaaatccaaaaccatttaagaaaaattgatattctaaactttgaggaaattcatcaggaaattttataaacaattcaaaatcatcatgaacatatgttccttcccaaaatgtccgaattgaatcatcaaccatattgacacttataggtggtgttacttctttttgacatgtattacaaccttgtaaaacaaccatccataataaagctatcattattttcttcatcattatatcacctatcaatactataacgcatattaaatcataaatcacatatttttttacaattatgacaaatttcctcgatatatttattatatacttcttcatgtagtcagaaaaatatttgttttcccttcaaatatagactacttcatgatatcctttcccaaactgatatcaattaaaaacagataaggactcccaccttatctgttttcttctattttttctttaatacttttaatacaataaaaattgataaactcattaacaataacaaagataacattaagattgatgtttcatcttccgtcttgacttgtttcatctttgtttttttgaccatctttttagcagatggtcttttttgttgtgtatctttttgccataaagcatgaagttgtacatcatgacgtggcattgttattgttgcatttaatgcataatcttgataaccatcactccatcctattaaatgataccctgttttatgaaatgtatcttgattgataagactaatgatttgattaggtgtatattgttcacaaattgtatgattcatttgatcatcataaattaattgatatttttgaggttctaataaaaggtcttgatgaagggtttgttgagaataaggaagggatatggtctgtttagattcttgaaagtcattatagcttatagtaaacttttgatttgttaataaaagtgatgggacttttaaataataaaaacctttttcattactataagctgtttctaataaatcacaatccttccataaatcaatcttcaatttatcaacacattcattggtctttttctctaaaacctgtccttcaacaagaatttcatcccattgaatcaaaagcgtttcttcttgatctaaagaatcatctaaagtaatcaaaaatgattgttttggtgctaaggtttgttgttttaaaagggtattgatttcatctaatgattgatgagaataatcttgataggaaaaggtaataggtgttgaaatggtcaattcttttatttgaatatcatatgttgattgattgatgatttcaatatgatgagtagaagatgataaaacaatatgactttgattttgtgaatcaagaacaattttcattgtttcatcagcatgaatatcttgtattttaaataaaaagcataaacaaagtaaaaaccataaaacatactttttcattttattcaccaacttctatctatatgttttccttatttttcaaatttatacaaaataagtctgaccctagtcagacttattgcaaaacttcttgataaacgcgtaaaacatttttataaaaaatcttttcaatttcttcctcatttaatcctgctgcttgtaaagcatgataaagcaaaggcatataagaagcatcttttaattctagattttgtgaaataccatcaaagtcacttcctaaacctatgcaatcaatccccgctaaatctttaatatataagatgtgtttcaccatcacagagattcttgataaagcattttcttcttcactttcttccaaaaatccaccagcaaaattaattcccataacccctttacgacttgcaagttttaaaatcatatcatcactcatattacgggcatgaggacaaacacttcttgcattggaatgtgaagcgacaaaaggcttactggtattttctaggacatcatagaaaccagcatcagacaaatgtgaaacatcaataataatcccaagtctttcacactctttgacatactcaattccaaaatcagtaagtccatgaacattatcacaagtatgataaccatgatgagaatcatctaatgaaaaattaggataaccaatgccattaggaaaattccaattcaaagtaatcatacgtactcctagacgatagtaatttcttaaataagctaaatcctggcaaacaaccgccccttcttcaagggttaataaagcactcattaatcctgattcttgatttttgatgatatcatcataatcataagctatacgaataagatcactatttttttccatttctaaataaaatgtatcaatcatatgttggacatgtttgatgggatcactgtttttttctaggtgagtaaacatagcaaaattctggattaaataatcaccctgttgcatcttttttaaacttatattcaaatgattatcccttaaaccaatatcttcatttaatctttgtaaacgattaatttcataaatcgtatcacaatgcatatcagcaactttcataatcttctccttaaaaataaatttctgtttcttgataatgtttcgtcatatgacgtgtttcttttaaccattctcttgcttcattgatttcatcttcatcaaaatctaaaaccccatatgtggctaattgacaaacatcataaagactctgccataaagcatcaaaatctccagtttcttcatctgacttttcactttcttcataagcatacatagcatgtgcttttatgattgcttcttcttttgtcatatttttttcctcctaaataatcaataataatgttgaaacaacaatacatattaaaccaatcaaagtctttcgactttgtttttcatgtaaaataaaataagcaaataaaattgaaactacaatacttaatttgtcaattggcaccaccacactcgctggtccatctttcaatgcttcaaaataacaaagccatgatagacctgttgctacacctgataaaacaataaaaaaagcttgttttttatgaatcatcgaaagtggttgataactatgacttacacgtacaactagccaagccatcataacaaccacaattgttcttaaagctgtcacggtttgactgtctacatttataattcctatcttagctaagattgctgttaaggaggcaaaaaatgcagaacctaaggcatataaataccaatgattactggttgctttttgttttggtttagaaatcattagataagttccaaacatcatcataagcatacataagatttttaaaggcgtcacttcttcatgaaaaataataaacgcaaaaatcattgttaaaaaagtactgagtttatcaattggtacaacttgcgaaacatcagctaaagataatgcccgataataacaaagccaacttgctcctgtcgcaattcccgataaaacaataaacaataaattttgagcattgagtccactaaaatcactgccactgacccacaccatcagccacgtaaaaacaaggacaacactagtacgcaacgctgtgacataatgagatgacatatcttctaatcccattttagataacactgctgttgcaccggcaaataatgccgaaagaaaagcattaattagccacatgattcactaataagtcctaaatgtagacaagctttataaatcccatcttcatcaataggtgcagtcacatagctagcaatagcttttaagcgtggatttccctgccccatcgcaacactcaaagaagcatgtaaaaacatttcataatcattcattgaatccccaaaagcaatatattcctgattgccataaatctccattaatcgatggattcccgtagctttcgaaaaacctgccacagttaaatctgcatatgttgattccccaggcaaaacattcaccccatcaatatctaaaaaaggggcataatcataatccttaggaccataaacaatcattgcatcaacactttgaccagtatactctccaacgggtggaatgacattattaaaaaatctttgtgactctaaaacatattcatctggctctttagaaatgactcttgtggttgattttaaaacgacggcaaaatttaattcttttgctatttttaacgtttctaaaacagctgattctttcattttggcatgaaataattcctttttatttttatctaaaatgatttgtccattattacaaacaaatccatcccaatcaatcaattccattaatcctgtcttggttaaagaatcaacacctctacctgaagatatgaccatttgataacctgcttgttttaacatatgtaaagcttttaaagttgaaggacagacttcatgatgaacattatcacgcagtgttccatcaatatcaaagcataacattggtttcatttatatcacttccttttttcaatattatactaaaaatacgatgattttcctattctttttcgctataataaaaaagaggagaagaaaagatgagagagcatttaaaaattaaatcagattttgatcaattaccacttgatgtcattgttttaagaccagcacatcctaaaggaatcatacagatatcacatggaatgtgtgaacataaagaaagatatttggattttatggaatatttatatcatttaggatatgtttgtcttattcatgatcatcggggacatggacaaagtgttttaaaagatgaagatttaggatatttttatcaagatggtgatattggaattgttgaagatttacatcagttaacgctttggattcatcaacaatatcctgatttaccattatatttatttggacatagtatgggttctttagttgtaagagtttatttaaagaaatatgataaagatattcagggattaattgtttgtggtagtccaagtcataataagatggctggtgttgggatttatctcgcacaaagatatgcccgtaaaaaaggtgatcattatcgaccaccattgattcaaagaattggttttgaatcttttaataagaagtttgatcaagcaacccctaatagctggatttgcagtgatccaaaagttgttgaacaatataatcacaatcctttatgtcattttgtttttaccgctaatggttttgaaaccttgtttaaacttgttcaaaagacttattctaaagaggattggatgttacaaaatccaactttaccgattcattttattgctggtcaagatgacccatgtattcaaaatgaaaaacagtttaaacatgctgtgaatcatctaaaagaagtaggatatcaacaagtagatagtcaattgtttgctaatatgcgtcatgaaatcttaaatgaaattaatcatgaaatagtttatgaacatattattaaaaaaataaagtcttgggcgtaatcattttacccaagactttatttttgtgacatattttgatagcgatgagcaagatattcatcaggataatgttcgtctaaatattctccaattacagattgagcaggaatttgttgataacgacgatatgctcttattaatgataatccagagattgccatatcaaaaacaataaatacagataaaatccaagttaagacttttccatagcgcataggaattcgttcaatcttttgagataaaaatgggtaaatattttgtacccaaacaactgcgattaacccccagaaaaaacaaaacaataaattgacacgaccatcaatattaaaaggaatatcactataatcccaaaatctcacaccaaacaatccttccgcaataagactacaaatatattcataaataccgcccgcaaaagttccaactgtaaaaatcgctaaatcacgtttaccttccatattatgcaataaaatggtcaataacacacaaccaaatccccaaacaattgagaattgtccatataataagctactacgactcattaattttcccatcgtaaaataacaccaaaccatttcaatcattgacccaataaatgaacaactcaaaaaaatccaaatcaatttatagatgttatatcctttagcaaatattttcatacccataccttccttacttttgacatactatatcattattaaaacaacaatacaacaaaaaaagagaatctgttaattaacaaattctccatattcattgacctgttgaataaccatatttccctgtctcaatgaagaagatatatcaataattctttgatttgaggaacctttatataataaagttaaacttcttagtgataaaacaaaacgtccatcaacaagagtatcacataaagacaaaagcttacgttcattttcacctaaattcaatatttcctcataagtatatccactatatatcatgacatgtaaatgcgtctgcttcacttttgaaaccaattcaattaaaggcagaggttgtaagaaaggttctccccctgaaatagttaccccatctaataatggatttcgactgatttcttgtataatctcatcaacttctttcaaataaccaccataaagatcatggcttttgggattatgacaacctagacaatgatgaatacaaccttgagtaaaaacacagtatcttaaacccggtccatcaacaatcgaatcattaacacaaccatataatctaatcttcatcacttataccatgtttaacacgttgggcttcttcagcacgttttgcatcattaaaacgatcaagtgttcctaccagataaccagtaatacgacggattctttcaaacccttcatgttcactttctttacgaccgcattttggacaaacatcatcaatgattccgttataaccacaaaccggatcacgatctacaggatgattaatagctccataacctatatgagcatcatgcatagcgcgaatgactttttcaaaagctggtaaatttttagttggatctccatccatttcaatataactaatatgaccaccattggttaaagcatgataaggagcttctattttaattttatcaaaagcactgattggataatagacaggaacatgaaaactattggtataatactcacggtcagtgatatctttgattttaccaaacattttttgatctaatttgacaaaacgtccggctaatccttcagctggtgttgcgattaaagagaaattcaattgatatttttgggaagcttcatctatacgtttacgcatatgcgcaataatttgtaaacctaagatctgggctttttcactttctccatgatgataaccaattaatgattttaaagtttctgctaaaccaataaaaccaactgttaaagttccatgttttaaaacttctctcacttcatcttgaggttttaatttttctgaatcaatccatactccttggcccattaaaaatggataattcatgacatgtcgacgacattgtatttcaaaacgctctaacaattgttgaatacataattcaatcatccgatcaagtttttcaaaaaattcatcgatatcaccttttgattttatagcaagacgaggaagattgatagaagtaaaacttagattaccacgtcctggtgaaatttcttttgttggatcataaatatttccaataacgcgagtacgacatcccatataagcaatttcagtttctggtgtgcctttgtaatattgaagattaaaaggtgcatcaagaaatgaaaagttagggaataaacgtttggctgaaactcgacaagctaaacggaataaatcatagtttggatcttctttattataattaacgccttctttgactctaaagatttgaattgggaagattggtgtttcaccatctccaagacccgcttcagttgcaagaagtacattacgcatagccattcttccttctggtgatgtatccattccataattgagtgaactaaatggaacctgtgctccggctcttgaattcatagtatttaaattatgaattaaagattccattgcttgataagtttcttgattggtttcaagataggcttcattcaaagtaaaatctttaattttttgaataatttcatgattgatatgataagcttcaagaatatcttgaacaaattgaaaatgtgtatgatcttctaatgttggtattggatcaattgattttactttttccatgacttcatcaactgataaatctgtcaaaagttcaatactctttcttaaattcttttcataccattttttatatgattttctcaccccatctgccatggcgtaatcaaagttaacaattgactgtccaccatgttgatcattttgatttgattgaatcgcaatgcatgttaaagctgcatatgttgtaatactattaggttctcttaaaaccccatgtccggtagaaaaaccatttttaaataatttgataatatcgatttgtgtacaagttgttgttaatgttaaaaaatccatatcatgaatatgaatatctccagaaatatgagcagcgctatgaattggatttaatacaaacatttcattaaattgttttgctgcttcgacaccatattttaacattgtccccatgggtgcatcagcattcacatttgcattctctctttttaaatcactgtctttagcatcttgaaaagtaatttcttccaatgtctgcattaatcttgatttacgtttacgataacggctgcgttctgcacgatataaaatatatgctttagcaattcttacatagcctttttcaattaaagtttcttcaactgtatcttgtactaattcaacagttggcaattctgtatgtcttgcttctaacttttgttcaacttcattggcaacttgaattgctgtatctaaatcatattttgcatcagttgcttgaaaagctttataaattgctccagcgattttattaacatcaaatcggtccatacgaccatctcgttttctaatatactgtatcatgttgtccctcctttagttcttttagtatctcatatttgcctatttttctcaatttatatgtatgattactcaaattttttaaaagaaaagaatatccgaagatattctttactaaactattcaatttctgagatttttaattcattaattttggctttaatttcttcgatagcctgtttttcatcaggaccttctgcaacgatttctaacactgcttttgttggaatacctaaagataaaacccccatcatacttttgagattcacttctttggtaccatatttcaatgtgacatcactatgaaattgtttaacagcattgacaagttctgtagtaggagttgcatagagtccgactgggtctgtcactgtaaatactaaattttgagccatatatgattcctcccttactttctatttatattatatcataaagatatgtaaggggtttaaaaatatgctcgaaaaaataaaataattttctatctttttcttctacgattgcgtttagatgcgtgtaaaccttcttctaattcatgatagtcaatgaagctacctaaatcataaacatgataaccttttttatagatttttttatacgctctttcactaattgctggattaattgcataaacataataatttaaatcttgatcaggataatattcttcaaaatcatccattaatcttagtggtaaacattctgcatcagctatatgtaattcatcaaaatctttttgttcatcaacacaaataataacaattttatcaggatttttaacgtatcgacgatatccttcattaatttctattttttttatttctatttttttaccaaatccaaacatagcatttcctccaatactttactataatatcactatttcgttcatttttctattgattttcttttttttgtatgttattataacctagcaacagataatggcctgttggagaaacggttaactcacatgcctttcacgcatgcattcacgggttcgaatcccgtacaggtcaccaattttataggggcgtggttcaatggtagagcatcggtctccaaaaccgtggacgcgggttcgattcctgccgcccctgccagataaaaaatattatgaatgtaaaatactaccaatatgtgcaagaggttgtccatatgaaaaaatattatttaatgaagtgcaatgtgataggagactattctcacttcaagaaatacttaaacttacatatgggatataaataaacatgttcaataagtttaaagttaagtgttatattggagtataaaacagtaaaatttatattttagaaaggaaaattgaattcatattttatgaattcatatttttatttaaaaagacaatatgaatttaattataaaaaataatccaggattagtttcatcaatagtattatttttaatagttaatataacgtcgtttattatggcgaaaataatttcttattttcccagctttttttcaaatatatattccaatactttaattggatttatattacctattataactttgccatgcacgtattatttggttaaatttttgaaatcagatatatcatcactcggcattactaaaaagaactttaccaaatcactaagtgttggagtacttatttcaatttgtctttttattatatttggtggcgatcataatgattatcaaaatgtgcttgtaactcctacaattatcatgttacgtatattatatttcttgatttgcgtttctgtagttgaagaaattgtttttagaggatttataagacaaaacatttggaagaataaaaaggctttatcatatctgttaagtggaattttattttcattttcccatgttacttttcacagtgttataaatcacattagttttatttggtttattttaaacagatggcaagcgctactcttttatgttttgatacatttatttttacaaataatttatgataaatatcaaaattgtgctggtcctattgcgattcattttgttattgatttttttggacttttctctatgtaattattaaataaaattatattactaaaatacaaaaggaaggaattctatttattatagaattttcttttttattttattatctttaaaaaattccattccctgttcttgatatgctaattgaggctcaaaataacctatcttttcttcaggagttagattatccttgttttttctttagagcaaattattgctttttttcatactcaaaattaaacataaatataataaaaagtcatctttctatgatgaaactaatggttacacatcgtagattgatgacttatttttttacttctttttaaatttatttacaaacaatttatcgagttctttaaattgctctttaacagttggaacttctccattttttaattcttttaacgggtttatataatccttttgaataactgtgtagaaattatctcgtggattatccaaatgatataattctgcccattctctaaaatgttgattgatatatttactaagttttacaggatcttggtatattttataaataccaataatattcattgggtcattaacagtcatatctttttctaataaaaaatcaaataaatcattcactttaagattattcataagttgaaatgaataagaatcttttcttgtgtgaatattcaaatcaacaaagtatagattataaataccataatacataccagcttctgctttagtacaacataatgatacatcaattccaataatttcatctctataaatttcaacatcaaaaaatgaaattatatcttttaatacatttaaattaacatagtgattattaatgatttcattatcaaatactatattcactttttttctttgaatatactcattgatattttgttcaactaattccaattcgcttttctctttatttatgaaatctttttttgtttccaaagcttttctaattgacagttttccatctaatataagtttaatctcatcaataggaacttccatagaacgtaataataagattaatctcaaaatatcaacatcacttgaagaatagtttctataattattctcatcacgtttaggatttatcataccttctttttcataataaattaatgcttgttttgtaatccccaacatatgttcaatttcatgtgtcgtcatataaaccatcctctctttctaaatttactctacactatatgctaagaatacagtcaagcatttcataacatcttttcaaagattcatcttattaaaacttctaccctaatcaatagtattttcttataacttactaaaataattattatatgctacatctattaattcaacttttattttatcatagtcatcccattaaaaactgttcctaaaacactcttatttaaagtattttccatataatcactataactttttaaaaattcatgaaaataatatgaatctacaaaaccaatgctttcctttgtaatctcatctctcacctatcaacacaaatcatatgattattttaacgcagctaaatgaaacatgaaaataatacatagaacaccattgtcattatatatttgtctttttaattcttatttattttatctacaaaataatgatataattatcatataaataaaaataattaggaggatgatataatggcaataacagtgaatatttattatcgtggagaaaacggaaatgctaaacgatttgctgaggaaatgatttcaagtggaattgttgctgatattcgtgctgaagaaggaaatataagatatgaatacttcttcccaatggatgatgaagaaactgttcttcttattgacagttgggtaaatcaacaatctatagatattcatcatgcttcacctatgatggagaaaatcacaaaacttagagaaaaatatgatcttcatatgaaagtagaacgttatgtttctgatgaagatggaatacctgaaacagacaaagcttttattcaagaataaagttataaaaaatctattttaatcaatgatctcattcttatttcttatcatacttatacaaatatatgatataatcataagtaaataatataaaggagcaaattttatgaataataatcaaatgatttatgttgatccacaattatctcagggcgaagcactcagatgggcatatttttttaaagaacttaataataattgggttattactagtgaaaatcctgagaataaaaatattgatacttatgaacttttagataaaagtgttgtcttaacaaaatatcctgaattaaaacaattattaaccttagatttcgataaaagtatttcatttcgcaaaggaatgaacagtgataaatggtatgattttcatttttaaccttagcaaaaaaagattgaaaaactcaatctttttttactttattaaagctttattcattacatgcattcgccaacaatcctgacatatataaaacaacaagaatccaaagattaaaagataatacaatgaatgcaaaagaaacataacaactccataaacaacacataacaaaatcataaacttcaatggattgactttatgaacaatgatttctaagataacattccacatttctaataaaatggttaaaaataaggcaatcaaaacacaatagataagacttttttgaaaagatgtcatagttgttgtatataaatagccatttcctaataaattacgagttatcacacaatatacaaaagcaacaccaaaatgaatccctattctttctttcataatgcttttctccttaatttttccataaaagatttcacataacttcttgtcagtaaaatcctttgttgattctttaacacaataatatatcttctttgtacatcaggaataaaactatcaatttcataaatatttacaatcattgacttattcactctagcaaaatgataaggttctaaaatagtttctaattcataaagtttttgatgtgttacaaactgcattgtttcagtataaataaatgcttctttagaatatccttcaatatagataatttgttgaggcaatattttaaacattctttccccttgataacaaagaatatattcatgactttgattaagatattgtatcaattcatctagatgatccattgaaaaataataacaaagtccttcataatcataacccttttcaaccaatactatatctaaatatagataatctcttaataatgattttaatgtagataggtgttgatctgaacagataattttcatgataacacctccattggacatagagtcgtttttataacttgccaattttcatcataataaacaacctttatagtttttatgtttttcacaggttctttaataaaattatgacttgtagataaatcacaactatcttccatcatcctatattccattaaaagaagatcattatcaccatacaagagttgaataccataaatattaagattatcatttttaagagaaaattttggtggacctataattgtattcatatcataacaaaaattttcaatagaaatatcttggtcttcataatgcataacacttggcttcacagattgaatatcacttttttgatcatagtaacaatcccctttttgattataaagttgaatttgaaagacaagattggatttttctacaatagaatcatttagtttattaatatcattatagatatcactatttatataacctcctgtgtacccaataaatggacaactttctttatcttcatattctatcttttggaatttatcatatgattctaaaataatttgatcatcttgaataattttatatctgactttatccatattttctaaaagctgatcttttataaaaacctgaacagcagagtaccaagtgacttctctttgtacaaaaagagttgtgtttttatgtgaatccaatccaaaaggtggaactttataatcattagtatcgactttaaaatatcgtacttcttcttcattaacttcttgttgaattgttttgacataatcatcttttatataaatgagtcctgcaacactcaaacaagaaagaatcaataatataacaaatgacttttgactatgccaaatagattcaagctttaaatttaaatattcatcttctaaaaatcgattaatctttatcaaatgatattcaataaaaaccaatagaataaccgatactataagtaaaatattttctattatcaaaagttgttctatccaataactaagaacaatcattataaaataacaaatcaaataacttctatacagttttcgatatttctttattttaggataatcatatccaatttcatcaattcctttaaacaaaaaatataaacttaatattagaattattgcactttggtttgaaaaaaacaaagtaacaactaaattgattccatttaaaatcaaagaaacaatcaaatatttttgttttactttttttaaaactataagaagtccaatgcaaataatcatcaaagcaacaacaattggaaaaagagaaatattattataatgaaactgaacacctaacaaaagccacaatcctacagctatgattcctattcccatcaaaccacctcccattaatattaaatcatatttatcatattcaaagtgaaaaacaatattaaaatagccaaaatgtggattatgttaccaattcaaactttaatttttgaaaagataactttactataattcatatctactatcttttcttagttgcaatcaagataaataaaatagataaaaatcttatatattcattttttaattatttttataaatatccattatataatatcattcaataaatctactgattcacaatgataaacatgtttacattatctctatcatattttttaaatcatttttagtagttaaacataactatgcattactcttattttttaaaaaacacatgtaaaactcttttaattcatattatataaatcaaaccttttctatttttattctaacatatttatcacaaatgaaaaagaattagccattattgactaatccttctacatattcttttctaaatattcataaagtgataattctttttgcataagtgctgctttaaaatttctatcatcaataatatgaacatgatgatattctaagatttcatataccgattttctgtcttgatcatccttttcataaagtgaactattaactgtaaaatgttgaccatccaacatattaaactgataaataacattgtaataattcattggtccaaaaccaataccacccacctttttttcaatgattattttcacattatcaatatctttgtaaaaataatgcttagccaattgatctgttgtttgcttcaatatagccattatactttttaatttcattttatgtctatcaaaaatataaaaatcaacatcttggaattcatagtatttttcatgaaaattaatcaacataaacaaaatccaaaaaataaaagttccagctagccatataacccatcctataccatttgtaaacaaatgacgtcctaaaacactcaacatagccagaaatataaaaccaacaatgataaaataaccgaacatttcttttacaagctgataaggtgttgtttttctcccgattgttataactgaataaggttgcataaattctgttattttttgaaataatgttttgatatccttatcataatcattatcagcataaaattctccatcaacaactgcatctaataaaggaatgttcttttaattttaaacatttttgttgtatttctgctaagttttcaacttgtaactgtaatgtttgaaggtgttattccaaaatattttgaaattcatcttgattcaataaaattctttctatcatttctaaaggaatatctaattctcttaaaaaacgtatttttttgagtgttttaatatcatccatagtataatttcgatatccattttcatctcttttaggattaagaaatcctagtttgtcataataacgaattgtttgtgaattcatttgtaacattttttcaacttctttgattttcattatactcatcctctcttgtataaaccgaaaaataaacgctaatttgattgttaattctattcatatatttcttcctttcaatcaaaccatacacccttcaacaactataaggtcaatacaatttcataaaataattttatatttttaaatttttattcttctagcacagttatatcatcataaaacaaagaaaaatataatagcttttttaaaagttattaattcatgcattataaaaaaatgatttgattattcaaatcaattaaacaatttcctattcctaaaataatccccatataaaatttccttttttatattatctcataaaaacaatatcataagaagtttttatacacatcttttcaaaagatgttataatatttttcaaaaaagaggtgctttgaattgaaagaaaatatcgttcatttaataaaacaaaatgaaaaacaaacaaatgaaacattagcaaagttatgtttatggattcttttatttgaaattattatttgtttgttatcactttttcatatctttgatgtccctgatcaattattgagaaataccttctttatgaccttaattcctttgctgcttcctactttctttatacatattattcattatcatcaagaaaatttaaaatatattattttgtttgttttgacttttgttgtgagtactttttactgtttttttacatttcaatctattatgttatttgttattccaatgattatttctatcttctattttgatcaaacattatttaaaacgagttatttcataggaatgttaggtttattgattgctcatgtgataacttctttctatattcctcaaagtatcattgaaccttttacaaatccttatatgattatggtatatggagccttacctagaatgcttcaatatagtttaatcagttttttgctctatatattaaaaaaacattatttacacctctttgataatctattgcaatatcaaccaacttcttttatcaaagacccaattatagaaaaacagctgaatgaattaacaaatagagaaaaagatatcttaatcttaatggttcaaggatgtaccaatttgcaaatatctcaacaactttgtttatctatgggaactgttaaaaattatgtttctaaaatttatgaaaagttagagacacatgatcgtacctatattgttcttaaatatagtgattattttaaagattgtgactcaagtcatagttcaaaatgacctgggaaactttcttttttaatgacttcttttatactcaaagatgaaggaggttattatatgaaaaataaaatatttaaaatattattcattattttcataacattatcagttattattttattgaattttattccaacgttttctttacaatctacacatatgtcttgcttaaaaggaaagcatgttaatctttattatgaaaaacactctgatgctgctaaggatgttttccaacttgccgaaaacaaagccgcaatattagaacacaatttctgtttaaaagacacccatttaaatatttatatgtatgattctcagacaacatttcaacaaaaaaaatatggttatattgttgcattgttaaatctagactggtatatcggtgataatcggggaacaaatgttttattaacttcgcctgatgccaaatgtcaaatgcatgattatcaaacaataaagcaaactgttcttcatgaaatgacacatgcttatctatcaacaatcaattctcatctatcattatggttaagtgaaggaatcgctacttatttgacaaatgggcaaacttttcaaaaaaacattttaaaccaatctcctatttgtacctatcaagatattcaaacgaataatccacttcacttttctaaaatgggtggatacatctatgctcccacatacatccaatttctaataacaaattatgggtgggatagtgttttagaacttattcgaactgaagattatcaaaaaatctttcataaaagtatgaaagacatttatcatgaatggtatcaatttttatataacatgtaaaaaaatctcaatcgagatttttttcactttcttctttaaataatgttcttacacaatcacgagcttgttcaatataagcataaggaacaaagattcgatatctttcaaataaaggtcctactttcaatgccattccagctcccatagatgttgtataagtataaggaatttgattattttctaaaacttcaatcagcatttctgcccacatcacttctttttcaatcaagaaacattcatcatcaggttcaacttctcttaaatgagacttaccacaaatatcacaacaatcattttcatttaaagctctgcatctttcacaataatacatatcatcatcccttcctacttctattttactacaattatttatcataagaaaagaaaatcaacttcctatgagaaattgattttaaccattagagatatatgataaaataattgcgaaataaaagacaaatcaatcatattatttaataattgtcacaatatcttggatatcacaatctaaaattgaacataaatcagcaatcgtattaagtgttacacttttattttttcttaaagcatctaatgtcccacgactgacatgatatttatttattaattcatattgtgaaattcctttaacaattaatgtatgaaaaaaaggttcaaaactaatcatatgagttatatcctccttgtatttattataaggataagtatttttatttaatattgccgaacatttggcaatatattataatagattcgagatgaaaagaggttagattatggaaaaaacagttgaattattacatgaaacatcaaaaagattagctcaaacaattgatatgattgatattttgtcacttgcctgttcatcagtagaaaaagctgatcttataggtcctttagaaattatgaaaagagatttacaagatctctattttcaaattgatgaagtcttatatgaagataaccaatgagaacgtcgataatagatgaaaaagacaatggaacttaatgtccatgtaagcggatatgcccaaaaaaccatatgaatttgcggaataatcataacagcaacagttatataagtgactcgaataatacaccagcaaaccatcatgacaatcattggtacaacggatttccctgctcctcttaaaataccagctatacaatgtgaaaaagctagcaagaaataaaacaaagtaacactacgtgcctgagctgttccaaaagcaacgacttctttggtttgatcaaacatagaaattaaaaatggagctaatatataaatactaatgcctacaacttcagcaagtatcaaagaacaaacaatcccaaaatgagcaccttttttaacacgctcatatttttgtgcacccaaattttgactgacaaatgttgtcagggctaatgcaaagcaagtgataggtaaaaaaccaaatccttcaatttttgaataagctccacatccagcaactgccatctttccaaaactattgatatgactttgaacaacaacattggctaaagcaataattgaattttgaatccctgctggtaaaccattattgataatttgtttaaacataggtaaatcaaaacgaatatctttaacatgcaaacgatagacttctggtgcatgtaataaatgatataaacataaaagtgcacttacaaattgtgaaataattgtggcaagtgctgctgaaccgacacccatatggaatacagtaataaaaacaatatctaagataatattaatgatagacgatacaatcaaataataaagtggatgacgactatcaccaacagcttgtaaaataccagttaaagcattatataaaacaaaagccaatgaccccataaaataaattctaaaataaataattgaatttggtaagacatcttttggtgttcccattaatactaagattttaggagcaaaaatcacaccaacaacactcaataaaagaccagagataatccctaaagcaactgttgtatgaattgaacgatgaacacgtaattcatcttttgctccaaagtatcgtgcaataacaaccccagctccgacaaagattccattaaaaaaaccaactaataagaaaattaaatttcccgaagaagcaactgctgctaaagctgaagaacccaaaaaatttcctacaattaatgaatcggcagtattatataattgctgaaaaagatttcctaaaaataatggaatcgcaaaatagataatcttttttgcgattgatccctcactcatacttgtattttccatctcccattcccccttgcatattcttatgatacgcgccttgcttttaaaaatcaatagccctttctcttgattgatatacattcattttctataatgaagtaaaggagttgattttatgaaaaaaacacttgttattggatcaagcgtttgtgatgtgattattagattgcatcgtattccacaagtgagtggggatgaaaatattattcatcaagaattatcgattggtggatgtgcttataatgttgcgcatattttagataatatgcattgtccttatgatttattttcacccgttggtcaaggaatttatggagattttgtgagaaaacattttgaagaaaagaagattccaattatgattgaaagtcaacagaagaatggttgttgttattgtttagtggatgatagtggagaaagaacttttatttgtgaacatggtgctgaatatttttatcaggcttcatggtttgatcaattagatgctaataattatcagcaagtatatgtttgtggtttagaaatagaagaagatcatgatgaagttattatccagtttttagctagtcatccacatttgacaatttattttgcccctggtccaagaatcaatgcaattgaaagaaagcgtcttatgaaacttttatatcttcatcctattgttcatcttaatcaacaagagatttttgaatttacaaaacaaaatgatttatccatagcatgtgcctcactttatcaaataactcaggccccaatcattgtcactttaggaaaagatggttgttattattatgatgaaaaaacatcatttcatacaccttctattaaaaccacagttgttgatacaattggtgctggtgatagtcatattggtacaattatagcttgtcgtagccaggatatgaattggccagactgtttaataaaagctaatcaaattgctagtcttgttgtgagtcaaaaaggatccacattataaaaacacatcaatttgatgtgtttttataaatctaagccatttaaaacttctttaagtgccttagcactttcttgaagtttctcattttcttcattgtttaaatatatgtcaacaaccttttctacaccttgacttccaacaactgttggaatacttaaacaaatatcatttaaaccaaattcaccttgcattaaactagaaattggtaaaactgcatgttcatttttaacaatcgctgtggcaattcttttaaccgcaacagctactccataataagttgcacctttacgttctataatctcatatgcactatctcgtacttgttgagcaagtctttccattgcttcttgatgattaaaatgtcctcttaattcacaaaaatgattaatatgaataccagctacttgagctcctgaccaaacagctaactcactatctccatgttcaccaataatataagcatgaacatcacgtggatcaacttgtaaatgacgacctaaaacatattttaatcgcgctgtatctaaaactgttcctgaaccaatcacacgatgtgctgggaatccagataattttaatgttacatatgttaaaatatctacaggatttgaaacaatcattaagattccttcacaatttctattcttaatttctggaataatacttttaaaaatagcaacatttttcttaaccaaatctaatcttgtttcatttggtttttgatttgctccggcagtaatgacaatcaatcctgcatctacgatatcatcataacccccagcataaatattcataggtgttaaataagcactcccatgacttaaatccatagcttcaccttcagccttttgatgatttgcatcaattaaaaccatttctgaaaataaacctgtttgaattaaactaaaagctgaagttgctcctacaaacccacaaccaatcactgcaactttttgcatatttaccataaatttcatacctcctattggctattagtataataggatttcaagatttttcaatcaatatgcattatgattttttcttaattggatgacgaatgacagtttttaaattttcaacttttgtcttgcgaggatcacttaaataaatttcatggtgataacgcaaagaatcttcttttaaatcattaacatatccttgttcttcaataaattcattcattttctgaacacttgtgacttcttcatcataagaacctttatgcataatttgaacacataatccttcatgatacgttaaatactgagccaaaccaacattcagttcaggctttttcttttgaacttctgctttcacttgttcaaaatattcttcagttacaaactcaggaaggcgaatcattgaataccaatgaaacatatttttatcaacaattctttgaccatcaaaatatccttcgtcaccaaaccacaatccttctaatggtggaacaacatattcaaaataaccatcgggttgatttccacccattttactcattttaattgtatatgaaatagcatataaaatacctatagcttctttatattctaaagatgtatttgggtcccctttcccctctaccatgacataatgaattggtggaacatcaatgaatactggttttgtcttaggcatatacaaatctttatactcttttttataatctaatttattcatgtatctcactccatatcttttctaattttcttacattcaagacttctcttgtcataaatttcttttgataaaataaactataggttgtcataggggttggtgcctgtaaagcttgttctcttgtttgtagatgatgtatcgtcaaagggatattttgctttatacaatactccttaatttcttgaacatatttaatattaaatggacattgatgtgtataatacaaaaccaacccatcttctttaacgtcttcaatcataaactttggtgctggttgaccatcctcaaaaggataaaacagcaactcatattcttcattccacttatcaacactataaaacccttgtttaattaaaaaatcataatccattaaaaaagcctttttctttggtgaagataaaattactaatcctttctttcctttagcttgactatccaaaatacatttctttaacaattctttcgcatatccatgaccttgaaatttccccgatacccataaacaattgatatacatataatcctttcctgttaaatgaatccaagctttttcaattggaatatattcaataaaacacttccctctctcatttaactttgtaaaaaccaatccttcttgtattctttcttttaaccactctttttttgaggttgcttgattatctttagcagacattgcacaacaaatatgttctttttcaatattatctaatgttaatgttattgtttccatacgattctcctttactgtatatattataccaaaataaacatgacaccttctgtcatgtttatccatatatttttaataatgtttgtatttcatgtaacatttcttctcttaatgaatgaggctcaataatttctacaccactaccaaaagataaaagaaaagataaaaaccatggatgatatggcattgatgtatgaatccaatatccatcttctttttcttgaatatcttgatcagaaaattgatcataaacaaaacttcctaaatatttttgaaactttaatactacatctatttttgtttgattttcctcatatgttaagtgtggttctttatagaaagcagatctatcaaattgttcatctttaatcactaattgttgaatacgagtcagtttataagtccgataatcagcttttttgacttcataaccatataaataccaagcattgtttttataaaaaagtttaattggaaaaacatcacgatgacttttctgtccttgagcattgatataatgaaaagtaattcttaaatgttttaaaatagcatcttttagttgtgaaaacttttcattcatttcttgatcttgatgccacgaagaaaaatcaacatctaaccattcttcactttctttttgaaagattgtctgcatatgttttaatagttcctgatattcactaacatgtaatgaagatagactagataatgctaataagatttgctcttgttgtgattcatctaacaaagatttatcaaatacaaagttgtcatcaagagacactcctccatctacaccctgttttgttataattggaattccagcaactaataatttatctaaatcacgatagattgttctcgttgaaacttcaaatttatctgctaattgtttagctgtcgtttgtttattttccattaaataataaagaatttcaaataatcttcctgactccatcttttttcacaccctcttaacttcatcatacacaatttctaatcagaacgcaaaaaaacttgtttaaaaacatttctttcttatcttttcaatcactcacttatttcaaacataataccttaatattttcatttattcattgaatgatgacaataaagcaacctttttgcctatatttatatctataaaattcctatattatttatatatatgaattgcattataaaaaaacactttttaataccacaataacaaattcattgaacaaaactaaatagttattatattgcttataaagtattttactatataattaataatgtattataatattacttattaatagtcaaaataaacttaaggagaaataacatgaaaaagaaaattactaaagaagaatattatttacaaaacgaagaaaaggttaaccaattattggatatctttgaattagaaaaccttacatttgatgaaaaaatcgcccttttattacctctgattgattcaacaatagatgatttttttactccgccacttttaaaaatgcctaatgaagttcctagtaaagttgagtcacactaccatagtagaattttgttagttctattaaaatatgctttagaatcgaatagtaaattagattatttaaaaaacatagataaccaaaataaagaactaataagtcaaaacgaacaaatcattgatttactaaaagaaattaaagataagtgagcaccacataagttgtggtgttttccatatgttattttattgtatatatttttcttataggatataattattctataaagaaagcgaggaatttaaagatgatcaaacaaaataatgacatggaaaatatgattaaggaatacggtttggaaaaactagatgaaagtgatcaaatagttgtttttagaatgtacaaaaatttaaaagattttaaaaaaaatgaaaaagttgcatatactatagatacaatctataacgctgcttgctatacacaaaattatctacttttaaaacaactccttaatcttcaagaacaaaacaatcaaatcattgagcagaataataaagttattgagttacttactgaaataaaaaacaaataagtagctcccataattatagtgctttattctataaaaatactttttgaaatttctttaatagttatagtgattataataatattataggataagcttaaataaagataaaaatctgctctattttacaatataatagacaaattaagatatgatttttaggtttaatatttttaaatacatatagatattatttccattgttttcatttcttttctcatataaaataaatatataagaaagcgaggaattgtgatgtttgataaaaatttaagtgaagaagaaaaaattaatttattgggtcttgaaaatctagatgatattgaaaaagatgctattaaagaaatgtttaacagtactccattaaaaagcggttttcatagtaggcgtagtactgatagttatggatcttatcagtctgctttagctatgtacactcagaattttatgattattagacgtcttttagaaataaaagaacaaaatcaacaaattatagaattattgacagagataaagaataagtagaaaacaccacgaatgtggtgttttacattattcataaccattaacaagagtattcatccaaacctttgccttggctcgttcctcctcaatagttaactgttggtctacctctttttgtttatctgttaatgggtatggttttgatggatatgacgttgcttgttgccctgattttcggcaaaatacattatatagtgacgtagaaatggcatcataaacatacattccttgtaaccataactgtgagtttttttgatcttctttcatttcataagcttgtctgtagaactttgttagttctacatcttggagatagaattcatcataactcataccaatagataaataaaagggaaagacttctttaaatatttgtgtataagttttgttggaaagtgaatctttggtgtctaaaaactcgctttccagctgattgcgttttttgaggagtcctcctcaaataaagtattgagagtatcagtagccatttcagataacttgttgtacatctcatttttatttgtgaataagtggaagatttcttcaacttctgcttttttaatacgtttatgatgagcatagaaagcatattcaaaaagttttggtaaaattgtgactggctttttattcatgtcagctaagacaataccatcaactccgattttttctaatgtttttcttgtatactctaatatataatcaacatcatttctatagaaatatagacacatgcttctataatgatgaataatatgacaaagacaatagtaatttatctttaaagttttaattagctggttagataacttgacttttcaagtaaaagtacctatacttcttatgaaacatagtgaaattgagaggttccttataatgaatgaaaaacaagttcaaaaaatagatcaaaacaaaaaaaccaaaaagcatattcgtttaaaaaaacaatatcatcaaaaagcacttattgttataggtatattgattgttggtatttatgcttttggatgtttttattatcatgataaattcatggctaaaacatcaattaatggtattgatgtttcaggattatctagccaaaaagcaaatgataaagttgctgatgtgttagtcaatcaaacattagaattaacttttattgatcaacaaaaagaaacattagttcaaaaagatagtggaatgacttttaatcgaaataatgatattgaaaaatcattaaaaaatcaaaatatctttttatggtttacacattattttcatcaaacacaaattgaattaaataatctcttaaaaattaatcaagatcaattaaataaaactatttcttctttaaaacatgttgattgcaaacaagaaaaaccagtagatgcaaaggttgaatataagaatcatgaattttctattcaaaaggaagtctttggtacaaaaattaatcaagaaagattagctcaagctgttattgatgcttttgcaaatcaaaaaaagacattagatgtaaaaaaagttaagggttatgacgaaccaaaagtgactgctgatgatgaaaaattaaaaaaattatatgaagcagctcaaaaatattgccatgcatccattacttatcagacaacaaagggtgatgttgtcttagatggaaatactttgatgacttggttgtctattgatgagagtggaaattactactacaatgaagatgaatttaaaaaacaagcaacagcttttgttaaagagttagcttctaaaatcaatattatttctaaagctaaaacttttaaaggtgctaatggaacaagaacagtaagcggtggtaattatggttataagttgaaccaaagtaaagaagttgagggattactaaaagatattcaaaatcaaaagaatggaaaaagaacacctgttgtgactggtgttcaacaaagttatgaaaatgggggaattggtcatacattcgtagaaattgatatgacgaaacaacatatgtggtatattcgtaatggaaaagttgttttagaatccgatgttattacaggagttccaacagatcctaaaaaacgtactcccgggggaacatattacatttactttatgcaacgtaatcgtactttgattggtgaaatgcaacccgatggaaaacctgaatatgaaacaccagttgcttactggatggcctttaatggtggaattggtctacatgatgcaacttggcaacgtaaatttggtggaaatctttattatacaagaggatctcatggatgtgtcaatcttcctctgggaattgctgcctcactttatgatatggttaaagtaggtaccccagttgtttgttattattaaaaacagttcatttcaaaatgaactgttttttttaacttaactctctttcaaacatctttttacttgtgatataaccaataaccaatatcaaaaaagaaacatcaaagggactctttgcacctaatattgcacttataaatccaactaagaaagtgacccctatcatgatagagattttctttggcatttgaaatctctttaaaagttgaaattgatttctcacattatgaatagcgatatagaaagcaaccactccaactaataaatcaatcgaaaagttaatcaaataatgacttgttaaaagttccttacaaaataacaaaacaatataaccagccattgtttcccataatccagcaatcgtaaacttatctatactttgctttttaatgacttgtattttttccttcatatttaaagatttttcaacttgagaaacataacttttaattcctttagttaaatttattttttgattttcatcatttaattgatctaataccgctgataaaataatattagccttcacaatatctttttgatgaagaaaaacatatttttcaacatcttgataaatttcaaaacaatccttactcaataatttaactttcaaactattctcatagaaaagatcatttgctttttcttttttcattagcgagtaacctttaattcatgtgcacttgtttcttcaatatgactattaaagaattcttccatcacttgaatcatataataagtatctttaataccagcagtttcataagaagaatgcatagcaagttgtggtaatccaatatcaacactattcattgatacttgtgccatagcaatatttcctaaagtacttccaccaacaacatcagaacgattcgcaaagaattgaacaggtacacctgctttttcacaaatacctttaaaaacagcaatacttacaccatcacttgtatatttttgaccagcatgtgatttcacaaccacaccttcattcatataaacacaattattgacatctgttttttctggatgatttggatgcacagcatgagcattatcagcacttagcatgaaacttgcagctaaagcacgataataatcttcatcatctttccctaaagcattgttaatacgatgtaaaacatcatataagaaagttgaagcagctccttgttttgtaccagaaccaacttcttcattatcaaaacaagcaaaaacattaatagattgatcatttgatccttttaagaaaccttgtaaagatgtaaatgcacattgtaaatcatctaattgtggtgatgaaataaattcttcatgtgctccccaaatagatggactcatacgattatataaatataaatcttcaccacaaatatcttcttcatttacatttaactctttagcaattaaagcttttaaatctccagcttttgtttcagttccaccaaataatggtaataaatcaacttgcttattataagcaaaaccatcattaacagctctattcatatgaattgcaacatttggaatcaatactaaatctctatcaatctttaataaacgtgtaatataagaatctccttctttcactaaaacacgaccagcaatagatagtggacgatcaaaccaagttgcacataacattccaccatatccttcagtatttaattgtgtatacttacctctcacttctaattcagcattctcttttaatttaaaagtaggcgaatcactatgagatgcagccacattaaaactatagttgtctaattgtgttccaagatttaaagcaataatacttgaattatttcttgtaacaaaataacgatgaccaggttcaatatgccatttttttccttctaataattcttcataaccattgtcttttaaaagacttctcatttgttcaacagcatgaaatgcagttggacttttttgaataaaagataccaattcttttgatatttctttatacatacaccatacctccatatatacgcgtatattataacatatccttctggattaccaaaaggatatgttgtttttgttattcactaacagaatttgaattttctcgttttctaatagctggcataattaaacctaatccaactaaaacaattggagtaataacgtttaaagcagtcgtaaacatatctccttctttatacataccaagtaaacaacaagctgcagtaacaataaagcaccaagctccagcagttaatgcaataccttgattcttaacaaatttatattctggattaaatttatcttttgctttacgtaaagcaatataagcagcaaatacccataaataacgcattggcattgttactgaatttaattttgttaattgtgttaaaacagcatcagcacttggaactaaagcttgaattaaaatgatagctcctgataagaatacaatcatccaaataccattaacataagcaccatatttgtttttctttaataattttgtaggaatgaattgacgtgcatcttcactatctaataacattctaagtggtgcatcaatactaataacaagtgttgagaattgtccaattgcattacatgcagcatagataatcattaaagcattacccattccatagtattgaccaagtttttggaatgcccaataagaaccattagcattataagcatcaaagtttgccgcaatatcagcaggatcaaacatcatacccattgctattgtacccaaaattgcacaaaccataaccatgattgctaaagcaatcattcctttagggaatccttttgaaggattttctaccttattaacataaggagaaatcttttcacatccaccaactgcaaaaaccaaaatagataaagatgtaaaatatcccatattaaattgtggaattaagtttttcaaactaaaatccatatgtaaatatccaccatttggattaatagctggtgcagcaaacatcatgatgatatataaaatagacatcacgaacatacttgttccagcaagtgttgctaatttctttaaaggatttaaaccacgacttgcaacccaacagaaaaataagaaaatagctaacgtcgcaaattggattggtcttgttccaaaagatgagaaagttgttccattttggaaaaccatccaacttaaggctttcaaaccaccgcttcctttactagcaatgtaagtaatatgacatgcccaataagtccatccagcatagtatgctaattttggtcccattgtttcatgaatccaagaacttacaccaccaccggcattcttaaatgctgaacctaattctccgaccattaaagcataaggaacgaagtataaggcaaacataagaatccagctaaagataacctgaataccattaaagtaaatataaccatttaaaacatttccaaatccccatacagttgaaaatgccataaacgccaggttataccaaacaatttttttagaatctgacattctaaaagcctccttcttttatattttataaccacaataccaaccgtgaaaaaatcaatgtaatacatataaattgttttaatgtacaaacattgatgtttagacagcagacacattataacaaatataccctatatttgctataaatttttatttttttatcacgataataaaaaaacatgattgcaattttatatgaacatgttagaataaaaaccactgaaagggtgattttatgaaaaacaaacaattattaccatattttttaacattttcaattgtcctcattatggttggaacatctcaacttcttaataatccagaaattatattccctgaaataacagctttagctattggatctttattagctccaaaacaagtatggaaaacatcatctttgaaacttgttttacttattatgatatatgccgttattggtgttttgatggtcaaatatctccatgtatcattatttataaaagttgtcattggatttacactatgccaaatgggacttattctttctaaaacaacctttgcccctcttatttctgcctgtattctaccattattattaaatactgatacttggatatatcctttatccgcaacaatgatgtctttcattattattgttatacaaaaacaattacaaaaaaagcattatatccatgattatcattatcaacctgtcacatttgattatcgtcatgaactcattcttttttgtaaaagattattcgttgttggagctttaggtatgttagccttacgtttagatatccgcttgcttattgccccaccactcattgttgccttctatgaattaagtggtaatcaccaaaaattaagaagtcaagcccctcgtctttattttttaactatctctatggcttttatcagtgcttatttgagatatttcttaaatattcattgtcacttctcagcaatcattcctgctgttatagctacagctttattactctttttcatttattattttcaaatctttttcccacctgttggagcaattactattttaccaatgattattcaacctcatttattacttgtttatcctattttaatagcagctggttttgctttattaattgtttttgcttttttaatctcatataaaaataaaatcttaactgatcaactttaagctttaaattatcatgatatgttttatctgtacattaagaacgatggtttttaaattatttatcatataaaatcaaaaagctgaatgaaataacaatttcaagttatttcattacagcttatttttatattttaatgtagttgtttttcttttttaagaaaaagaaatgctgcagctgtgagtgtcataatgactccataaacaataaaatcattttgatcagctgtttgaacagtcttatctggagttggttgattttgatttgtttgttcatggtttattggttctttattgttattgtctggtgttggcaccacagttactttaaccaattgattcaaagttgtttgtaattggttatacatatcatcaatttgtttttgagtaggattgcttgttaataatgattgtgcagcttgtaactctttttgtaactgtgcaatagattcttgtgtataatcacctttatgtgttaatacctcttgagcatctttgatggctgtttgtaattgagttgtatcaacaatttctttgaatttaacttgaacattgagagtctttttataatcaccattgacaaaagtaacaggataaacactatcttcatcttctaaaattgtttctggtttatcccagctccaaccatcaggtaaagcaactgttgataacgttttacctttttcccctattaatgaaaaatcacttgggaaagtacgatctgttactgttaaaatcatacttctacgattcattttatatgctttttcagccaaaggaacaagcagattaggatcccattgatcagattcaaattctacatcattaggaatcgctgtataatgaatattgtattggccaacaggtaattgagctaattttgctttatcatcttgacctgaacatcttaatgaacattcagttttaccacctgtagatttaaacatatattcgtcatcaattgaaaaatcaacataataaccttcagtaactgaaatattctttaataaattaggaatgtcgccttccatcattgttatattttctaaaccactcatttttggagcgtcttgataataagcatcagcagcggctttttgttctttattttgaccataatatacataatcaatatcaaattcactacctgctaaatcagtagctgcatcgccaggccaatttccacccattgctaaattcatttggatatattgtggcttatttaaagctttttgagccactggtaaatgactataatcaacactttctacaatttgatcatcaacataccactctaacttattaggtgaccaattgataccaaaaatatgatattgattgttaaaatcttcatcaattgtataagccgttccagctagttttgtttcagtaatacgattagcatcagtatgtgctgtttggtaaaccgttctattaccatagctaccatctttggcttgtccaattaattccatgatatcaatttctccacaacgggcccaaccgtaaccttgcttagaattgatatcaccatctaatacgaaatctgatcctaaagtccaaaatgcaggaaatacgccttgtcccttaggtaatttagcacgcatttcaattcttccatataagaactcctgttttccatgtgttcttacacttccagaattataaataactttacgtccaccacgaggatttatgtattgatcttctttagcacgatcagttgcttttaataccaaatgaccatcttttaaataaacattttctttatcattgacataatgttcttgttcattaccacgtacacaacctaattcataaccccatttgctatgatctaactgatttgaattaaaatcatcagcccagataatattataattatcatcaattggtgttggatttttctcaactaatgaaacatcatcaacataaacttgaccatgataaattgcatcatctgtactttcagtccatttcattgcacaaagtgatatttgtgaataatcaccagtattaaatgttaattcaacgtcttgatatttccaggcttgacctgtaggacatgttacagttttttcagcctcttgattaattaactttgaaacatccggtgtctttacattaaaaaacattgatgcatcttcagatgcgagaagaatttttgccttagcaacataatctgtgttctttttaacattaacaacttggtaaacacaagcattattagaatcagatggtaataatccacaccatgcaccactagcagctgctccatcaaaattagtaaatgtacctgttccagttgttttccattgtttatgtccatcttcaaatgaaccatcaacaatgaggttttgttgatcattgttttttaactttactaaatcatgctctgttgttacacctagtgcacgaccacttacaatattcccaccaataagggcaagggccataagtaaagctaaagaaacttttaactttctttgttttttcataattgtcttttcctttcctttttaagaaaactcaaacaccccgcccaaatatgttatcgctttcataagacatattatatatcgttttatcaaatatgcaacagttgttattaataaaacaggacaactatcattcaagttgtccataagcttcttctaaagttaaaaaatataaatctcttacaccaaaatcatctgcctgagaaatcaaatcataatattctaaatcttctaatatatattttgctttttcttcactataatgaagtttttcaactaataaaggaatagaagcataacttgcatctaataaaacttctaaaacattttgataaagatgctcctcttgttcatcaattgtatgacgatgaaataacgcatgacgattcgctttctttttcaattttttcaaatcatctccatcccacaattcaacttcattattacttgcaagtgtcactgcttgatgagtaaaacgatgatttgtaactacaacagcatgatcacattcataatattgacatccagaataagcttgctgaacagcagaaacacctactggttttgcatatttcttacactgaatcgcataactttcacccttatactcagcaataatatcaaccccataatcaccactttttttcgttaaagtaacatgcttataaccatttctttgtaaaatagcttgtacatattcttcaaattcctcaccgctcattctttcatcaaaatccggaatccagccaaatagaaacccaaatacatgttttaatacaaaaccaataatcctaacaattcctttcataaaataaaatggaatctttaatataaaaacaataatcttcataacgctcctttattataaggcaatatactcatctttttgtcgtatctcatctaacagaatattttcatctacgcgtttaaacttccaatattctataaattcttgatcatgaaattcaatcacctgattatttttatcaatcgttctatcattcatcttgccttttatataaacataaaaactttcttcttctaacaaaatatcagtaatagaaaaatcaagcaaagcaacatctgttaaaagatttctttcacctttatcaatctgattttgaatctttaattcccattctttccataatgatggggttaaatacaatttcaacaattgtatattttgatcactccaagcttgctgaattgtaaaataactttttgaaatcttatcacttaaaatatgttcatcccaaaatgcatcaacctgctgagctttttcccacatatgactttttacaacattttgcttatttttattgaaggcattcataattcccccaaatagtaaaaagcccccaactccaacaagaataatcgaatcaatatgtgaagatgatgaaccattagaataatcatgatattcataatagctataaccatttccactactacttccactatctccaccattacctccacctgctcttgcataaacaggtaaaatgacaaaccaaccgatgctataaacaagtaaaattttaagaaataattttttcatatacctctccttattctttcaatccacatcttttcctcattataacacaaacttatgtttacaaaaataaaagtcatgataaaataaataggaaaaggaggacgactatgttaataactgcgactcatttaacaaaatataataatttaaaatgtattgtagatgatgtttcttttactatcaatgaacaagataaagttgcattgattggtattaacggaactggaaaatctactttattaaaaatgattgctcaaattgatgattatcaaggtgaaatattaagaaaaaaagatatccgtattagctatttaccccaaaatccagattttcaaaatgaactgactgttcttaaacaagtttatgaatatgttggtcatgatgttgaagaatatgaagtcaaagcgattttaaataaatttggaattattaatcatgaacaaaaaattgctgaattatcaggtggtcaacaaaaacgtgttgctttagccattactttgttaaaaccttgtgatttattattacttgatgaaccaaccaatcatttagataatgaaatgattgaatatttagaaaaatatttaatgaaatttaataaagcaatttttatggtgactcatgatcgttatttcttagaacgaataacaaataagatttttgaattagatcgtagcaaaatctatgaatatgaagcaaattattcaaattatttagaattaaaacaacaacgtgaagaaatcactctagccagtgaaagaaaacgaaaacttttcttaaagaaagaattagagtgggttcgtgctggggttcaagcacgttctaccaaaagcaaagatcgtttaaaacgttttgaagaattaagtcaacaaaatgatactcaaaagattcaaaatgtagaaatgttaagtgtatcttcacgtttaggaaaaaagacaattgaattagagcaggtatcaatggcttatcaagaacttttgtttgctcctttttcttatcattttaaaagacatgatagagttggtattttaggaagaaatggttgtggaaaatcaacgcttttaaatattattgctggtttaattaccccaacaagtggtcaagtgattattggtgatacaattaagatgggatattttaaacaagggcatgaagatatggatcctaagatgagagtgattgattatattaaagaaactgctcagattttaaatacaagtgatggtcaattgagtgctaaacaaatgtgtgaaagatttttatttgattcacaaatgcaatataccccaattgaaagattatctggtggagaaaaacgtagactttatttattaaagattttaatgagtgcgcctaatgtcttattattagatgaaccaacgaatgatttagatattatgactttacagattttagaagattatttagatagctttaatggtattatcattactgtttctcatgatcgttatttcttagatcgtatttgtgatgaattatttgtctttaatcaacatcagattacttaccatattggtggttatagtcaatttattgaattagaaagttcatccaagaaagccaaaacaccaaatccaaatacttataaagaacaaaagaaaaataaggtaaagctttcttataaagaaaaacaagaattacaagttttagaagaattgatcccaaacttagaaaaacaaatcaaagatattgatgaacaaatgaatacaatctcagattttgaaaccattcaaaaactaactgaagaaaggtcatctttagaacaacaaattgatgaaaagagtgaacgctggatggaactcttagaaaaagaagaacaaactcaaaacaacgcacgttaaatgcgttgtttttggttccacataatacttaaatgccctggctctattgtatcaaaacgggtatgaaaatcttgattacgaagaaattgaaaaccacatttttgattcactcttgctgattgatgattctttaaaaaatatccacataaaagataatcataacctaaatctttaaaacaatattcaatcacacgtaaaacggcttcacacatgattccttgaccccaataatcacgatttaagacatagccaatttcacgaccataaacatcttgaaaagctggatcattagctaaacgatcttcttcaatcccaatactaccaataactttatgatttgatttaagttcaatcgcaaaagtctttttttcttgaataaacattttaagaatatgctttgattcttctattgattgatgagttgaccaaccagccatctctcctactcctggttgtgaagcatactcattaaaatcttttaaatcagtcatttgccaagaacgcagcaatagacgtttggtttctaattgaacatcactggtatcaatcttcgcgttcatctttttgttcctcagattgaacttgcaccttaattgttgcttgttcaaccttgatatctttaacagcatcctgtgcagttgcaaataaagggatatctacctttgcagtatctgtatcttgagtatctaatcttgtctttaatgccattttttattcctcctttaaaatctcatttaataatgttactgatgccatggcatcttcactataataatcagcaccaatttcatcagcaatttcttgggttaaaacagctcctccaacccaaattggacaatcaacgggaattgcttttaaagcttcaatagtacgtttcatattcacaacagttgttgtcattaaagcacttaatccaatcatcttaggatgataacgatgatatgcttcaacaaccttttcaactttgacatcttttcctaaatcaataacttgataaccatagctttctaaaacaactttcacaatatttttcccaatatcatgaacatctccttcaactgtacacatcataataggtcctttggtttgactatctatcgcaaaggttgatttaactatttcaaaagcaagttttgttgtttgagctgattgcattaattgaggtaaaaagattttatttgtttcgtagtcttgaccaacttgatttaaggctggaataatcatctgattaataacatccattgcctcatgagtttgcagaacttcttttgtctttgtttgaacttcatcttttaaaccatgaataatcatatcttctaaggtaaaagttgatggatttttggctgtttctaattgtacattggattgcatcgcaatatagtgagaactatcctgatcaaagttatataaaacattataagcgccaatactatccattaattgttgatctaaaggattgataatcggtagatctaaacctgaatgcaaagctaatgttaagaatgtacgatttaataatggacggttaggtaaaccaaaagaaacattagaaacacctaaaacggtatgaactcctaattcttgtttaactaaagttaaagctttgagagtttcttgaacttctttttgttgagctgatgcagttaatgttaaacagtcaatgataatattttctttacctattccatattcagctgccttatttattatttttcttgcaatctttaatcgttcttcagccaataacggaatcccatcttctaaagttaaaccaataacaactccaccatattttttaacaatcggaaaaatagcttccatgacttcatctttcccattcactgaattaatcaatggttttccattataataacgacaagccttttcaattgcagctggtgaagatgaatcaatttgtaaaggtaaattgataacttcttgtaataaacgaatcaccttaaccattgttgaaggttcatcaattccaggtaatcctacattgacatctaaaatatcagctcctgcttgttgttgtttaatgccttcaacaacacattcatcatagcgttcttcttttaaagctgcttttaatttctttttcccagttggatttaaacgttctccacaaacaacaacctgaccgttaaaagttactgtttggttttgacttgacacacgggtatatttcttaacttgtcttggagtaacatgacaaggagctacttttttgattgcagcaataaattctggagttgttccacaacatcctcccaccatgcttacaccttgatgcatataatccatcataccttcaacaaatgctgaacttgtcatttgatatttggtttgtccatcttctaaacaaggaagtccggcatttggttgaactaagataggaagtgatgtattttctaaaagttcatctataatcggttttagttcagttggtcctaatgaacaattgactccaagtgcatctgctcccaaaccttcaacaacattcacaaaagttatgggatcactacctgtcaaagttcttttattctgctcaaatgtcattgtaacaaaaactggtaaatcactattttctttaactgctaaaatacctgctttgacttcatataaatccgtcattgtctccaataaaacaacatcaacatcatctttaaccattaaaacttgtgaagcaatgatctcatatgcttcatcaaaagataatgttccaagtggttctaataactgtccaattggtccaatatccaaaacaatataagcctctttattcacacgctctcttgcaattttagcatttttgattgctgcctttaataaatcacaataacaatatccactatcactcatctttaaaggattacacccaaaagtattcgctgtaataaaatcagctcccgctttcaaataacgttcatgaatatcgataataatttccggatgttcaatattataaacctctggaatttcacctgcttttaaccccgcattttgtaattgtgtccccattgctccatcaaaaatcagcaaatctttctttaatcgatcacgtaacatctttgtcccccttttcttaatgcacaactctcttttcgtatacacgaatgacatgatttggccctttgacttcctagtccaatcattccaagcattgatttcacaggaataaacaatccccctgcgttcaatgtcacacctatctttttatcaatttgtaaaactcttgataatggcttattcaaagccaaaggtaaatctccatatcctggagcgaaacgaaaagtatgcatacctaaatctaaagttttttcatactcatcgcaacattcttctaaatacgtattactcacagcatcaaacacaacagcttttgccatatcaatatgttcataatatttcatttgacgatctatttcaatgcctagtgtacaggcaatgaccatacatttatgacaatcttgaaaataataagtaagatctgacgaagggatgatgagatctaattcttcaatctttaatggtgaatgggttaaatggaagatttgttgagtcactttaaaataagctttttcttggacttctaaaatacattcatcaattaattgattcgttttctcatcaacttctccttgataatttaaataatttaatattgttttcttattcatgatttaactcttttaaaactgttggaatgttattgaaaatagcttttgcaatatctggtttattcattgtataaatatgaataccatcaaccccatttgttattaaatcaataatttgatgggttgcataattaattccaatttctttcattgcttcaggataatcataataagattcaatcattgttgataattgataaggaatagaacatccacacatcttagctgtgtgaagtaatgatttagaattggtaattggcatgattccagctaaaataggaacagtaatccctctttttctagcttctttgaccaatctataataatagttgttatcaaagaagatttgagtaattaaatattcagctccagcatctaccttttcttttaatgcttttaaatcatcttcaaagcaagctgcttcattatgcacctctggataacatgccccagaaagacaaaaatcatttggaaattcttggctaatcaattcatttaaatccttagcataatgaaactcaagattttctttatcaaacgttggatcttttggataatcacctcttaatgataaaatattttctatgttatgttcttttaattgttgacagatatctaaaacttcttgagaagttgatgatatacaagttaagtgagcaactgcttcaatatgataatcattttttatcttagaagcaatttctacagtttttcctttggttgaacctccagctccataagtcacactgataaaatctggttgtagtttagcgagttcatcaattgtataataaatcgaagaaatatctccagttttgttcttaggaggaaagacctcaaaagaaattgttgctttattttttagaatttcagaaattttcatatatttacacctcattttgctatattttaaagcatataaaaagaatagtcaaaaactattctttaaaatacatataaatttcattattctcttattgttttattctctaaaccatcttttttgagaattgaataaatcggaagtaaggaaaaagaaattaaaattataatcagtatcaatgttggtaacacttgttccatcaatggaataggatccataaaaatatgccatccaccattgcctccatgttcaataaacatatctgcaaaatgataataaagcgcaaaaacaaatccaagacttgcaataaacaaagacttatacatatatattttccatatttctatttttctaaaacctaataattgataagttgcgattgtttctctttgttttaataattcaaaagacaattgataaatataaataacacttgttgcaacaatcaatgctaaacgtaaagttggaaaatcaaatactgattcttttgacatttgatattcataatctctttgtggttgtaaagaactgtcaataacattatatttcatctttggattagcttttgcaaaagcaaggattgcctgattcttttgtgcaatactatcaaaagagagataaacttcttgataatgttttacatctgcatatttgataaaatcatctttagacataattataaaattgtcttcatagtcacttaatacgtatacaatttgaaaaacatttccatcaaccaaagaataagtttgcatattgttattatctctatcaaatcctagactaacaatcatttcaccagtttttaatacttgatcttgtggtaatgaaaattgtttttttacattttcatcaagacaatagattttacggctataaccattttctggtgaatataaaaagttatgtgtatatataacttctttagcataagaagacattgttttaaaatcatcaagatgaatattggtattatcaacaattggtgaataatttaaagttacattttgtgatgtttcaacatattcatttctttgctttgttaaatgtataccataaatataatctccaataattgacatcatcattaaagatgctataaagacaaagaaaatcttaaatatcatttgttttttattattaaccaattgacgccaccctaaatacattggacgcatttgatgtagttttttataacgataatagaaatattgaaattcagctgattcaaaagatccacttaatgcacgtcgtgttgcgccacgagctggcataaaatagctaatcaaagacatcaagacaataacaaaaatacaacctagataataattccaattgaactgcaatggtatgattgtatccacaataagaatgaaaatacttccaacaatcacataagcaatacttgcaactataatagataaaagcgctaatatcatggcttggataaaaacaatataatagacctgccgttttgttgcaccaattcctcgtaataaagtgtaatcattcttacgattttcaaacgaggcaattgtcaatcctgaaacaataatacatccaacaataaataaaacaaattccacaaccacaattaagaaattaagttgagattttgaaccaatatcttgattcaaatcaaagactctatctaattttatatctccatgaacacttatattttcttgtttataagtatcaatataaacagcatatttttgtggtgttgtttgttttcctaaaagaataggtgtatccccactttcttgtaagataccaacaactttccattgccctacagcattatagcactcctcgttcccctctggtgtaggttgataatatcgatatgctacctcaatattttggtcaagttttatatcataacccatacgctttagggtactttccttaatggcaacttcgttttcttttttaggaaaatgaccatcttttaattgaatggataaaatatccttattgccttcaacataatggatggaatcatctccagatgagtatcctatatcagccacaagggcatactcaaaatcagcatccttaaacatagtctctttattttgataagttataggtgtttttaaaatttcatctttatcataagttgtataacttgtataatcataactaccatgttcggcttgtaaatttaaaatatatgaattgagtaaaagcggtgttaaaaaggtaatcatcataatacaaaatgaaagagcaatcaatgtgaccaaagtcactttgctatcgttacgatgggtttttaaatcttgaattgcaaaatgatgcagtaaattatttttcatctgtatcacccacaatctgaccatcacaaatcgtaataatacgatcggcttgagaagctatcatatcatcatgtgtgaccaaaatgagagtttgcttatattgacgttgtgacaattttaacagttcaacaacttctaaagaacttttggcatctagattccctgttggttcatcagctaaaataatagctggtttcatagccaaagctcttgcaatggcaacacgttgttgttgaccaccagaaagttctttgacaaaagccgttttcttttcttttaaacctaataaatccaaaagttcatcaataaattcatgatcttcttttaaatgatctaaatgaataggtaaaacaatattttcaataacatttaaacttgaaatcaaattatagaattgaaaaacaaatcccatacggcgacgacgataacgtgaaagttgatcatcactcatatcatataaagaatttccttctaataaaaccactccatgttgaggttttgttaatcctcccatcacatgaagaagtgttgattttccactcccactctttcccacaatagcaacaaaacttccttcttcaattgtaagattaatatgtgaaatcgcatcaaccttattttcatcatatccataactctttcttacatcttttaattctaatagtgccatacactttccctcctcactatctaatataaacttcttttcttactcgatagtgactgtgtatttattttttgtttctttttgaggcaagaggatttcaaaaacagcaccttgatcattatagatatgaatacttccatgatgatcttgaataatttcttgagaaatcgataatccaattcctattccttgatgagattgatattcacttcgataaaaacgttcaaacaaatgagggatatcttcctctataaaaccatggccatgatcatgaattatgattttcatataagaggatttttctaaacaagtgatatcaattgatgaatgaggtttttgttcaatacaattctttaaaatattttcaatggcttctttcatccattgaaaatcacaataaatcatttgattttctccttgtattttcaaatgaacatcattatcttccatcaatggatataattgttcttgaatagaatctatcatctcactaaaaagataatcttttttatgatattcaatagaatgagaatcaagttgggcaagatgtaataaagattcaatacaatcttgtattctttgagtttgaaaaacaatctgttcgacaatttgatgttgttttccttgggtcatttctaataaaagatcttcttttaaaaacatggcagttaatggtgttttgatttgatgagatatattttcaatatagttttttaattgattttgttcatgatgtaaacgttctaacattccttgcattctgatatttaatatatgaagatgagatgataaaacagcaatatagctttctccatcaataagcggaaaggtttctgctttttcttcaataatcatttgacacatctctattaaagttagaagtgatttttttaaatgttgaatatatctaaaatggatgatgattataacaaaagaaagacaaagaataatataataaaaaaagatattttttgtgataagagccactattgaaatcatcataatcattaataaaaacacaatacaacctattgaatagagcgattgactttttcttaaatgcttctccatcgatacccaatccccctaactgtttcaatatagtccattccttgataagttcctaacttttctcttaaccttttcatatgtacgctcaccgtattatcttcaatataatttcctgtacgttcttctataaattcgattaatctttctcttgtcacaaccacgccttgattttgaaccattaaaaataagatttcatacccaatagcacttaagagaatctcttgttgttgtttgaaaacatgatatttttttatatcaatatataaatcatttgtttcaataacatccttgtttttaagaattcgtcgtgaaatactatgcattctcgctaataattcattgacacgaaatggtttgctaatgtaatcatcgccaccagcatttaaagcctctaccagtgtttcttcatccgttctagcagttaaaaacaaaattggaacttggctgacttgacgaatttgttgacataatgtcacaccattgccatctggtaattgaatatccataataatcaattcaatatcatgaatatctatattcagtgtctctttgattgtataggcttgtttcacttcataatttttcattgttaataaatcatataatgtttcttggattcccaaatcatcttctacaattaatatcattctcatcacatccccctacattccattctatcaaaaaaaagaatagtcatctattcttttccttactataaacccataaattcttaatttgatttttaatttcatcaaaacgataacctttttgactatgttgacgactatttggatcattaacataaatcaatccatttttatattctctaagaacaataaaatgtccttcagttgtaaatattcctggtcccacactacaaataatgggatgatgctgatctaattcttgtttaatcatatcttcatttaaaggcatctgactcgcattaacgccaaaacaccttgctccttcatccattaatcgccacgatgttccagcttgagtataataacctttttgataagcatattttgcaatcacataaggatttaaagaagcattgttttgtaaataacttaaaaccattgataaacatgttggaccacatccattcacagctataaaatcatccccatatttgcgatatccccatcttgtatcccattgtaaaagtaaaggaatttcttgagattttaaatctgtttttaaatctaaagaaaggttttggggttgacgtaaataatgtgaaacaaatggaattgtttctttattatgcattgctaattttaataatgaaggtggaatatcatcctgatgttgcataatatatgaccaatctgcagattggtcataagcagcatccatatgtacatcttcttttaagacatagtggtctaaaagtaaaataatgaatggaataatgataattgcgataaatacaatgattttacgtttcatactcacatctccttacagacactagtataatcaataaagtaaggaaattgtttaacaaattcttaagattttcttaaaatggttgccgtggtaaaataacttcaaaaacagtttgacgattttcacttgtcactttaatatgtccatgatgtaaatcaacaatcattttcgcaattgaaagccctaagcctgatcctccagttgttgaagaacgtgattcatctaaacgatagaattgttcaaaaatacgattcagcttatcttttggaatcgtgttccctacattagaaaataaaatatggctataaattccctcatgatatgctttaacttgtatagttgaagaagcatcaccataataaaaagcatttttaaaaatattattaaagactctagctattttattaggatccgcatatatcataaaatcattttcaacatcaatagaaactgtttgttttttttctgaaagaataggataaaattcttctttcatctgttctaataaataagataaacaaacatcttcttgatgtaattgattgtaggcttgatttaattttgcaatatcaaaaaattcattaattaatttttctaatcgatacgctttttctaatgtcatatgggtatacttttgacgtaattcatcaggtaaatcattcgtttcatctaataaacataaataaccaataactgaagccaatggagttttaatatcatgagcaagataagcaatcatatcaactttatgttgttcctcttgaatagctttcttctcattttctaaactttctttctttaattcatttaaatcattttctaattcaaataaagattcatccaaaataattctttgatcatttttttgaaataagattttcatttgtgaaaagacttgtgatattttttgaatcgcatatatttctacaatcaatgaatttaataatagagcagctaataaagtcataaaaacaaaagcagtttgatttttcaaaataaaattagcaaaatcccagccaaatatttcttgtataaaattaatcactgccccattataaaaatgatccacaaaaaaatacatcaacaataaaataacaatcgatatcacagcaatcataacatgtctttttaatatttctttttgaaatcttcgtgtataatccttagccaattttataacctactccccatactgtttgaatatattttggattctcagcactatcatccattttttctcttaaatgacgaatatgcaccataattgaactacttgaatttgtataatatttttcaccccataaatcttgaaagatctgatcaacagtaacaacttttcctttgttttcacaaagtaaccaaagaatagaaaattcagttggggtcaaggataagttttcgttatttaacaaacattgatgattatcttgatcaatcgttaaagctcctatggtaatgatgttttctttttgttgtggtgtcatcatcttataacgacgtaattgagctttcacacgagccattaattctaatggtcgaaatggtttggtcacataatcatcagcgccaatagttagaccagtaattttatcaatttcagtttctttagcagttaacattataataggaaatgtatatgcctctcgcattttttgacagattaccaaaccatcaatatctggtaacataatatctaagatagccaaatctatattttcatgaaaagcacaatgtaaagcatctgttccattataaaacttaaaaacttgatatccttcattttttaaatagagttctactaaatcagcaatttctttttcatcatcaacaactaaaacattcatattcccaccccttttccctattatattacataaataatgtgaatatcttaagaatttattaacaaattgtcaaaaaagataaatgaacactatatcattcatttatcttaccatttatagaaaatcaattgttttttctttgtttattaagttttcttcttaatccttttttaactttttacccttatattttttcttttaaaattatatcaatagctttggcaaaaccgtcattttcacattcatcaacaactcgatatgctaatgatttaattgtatcatcagcatttttaggcgcaaaagaataagggaacaattgaaataaagtgaaatcattcataccatctcctaaaacagcaatatctttcttatcaatctttttaagctgtgctacttgttgtaaaatcaaacctttttgggcattttcatttgtgacttccacattatcctcaaatgatgataaacatgaaattgttggaatatgcactaataactctttagtcggtgtaatatcactagcatttaatgaaaaagcttcaaccttaataatatctaaatctctctgtagaaattcttgaatatcactaaattgttcaagaagattacaaggacaatttacaaatgaaccatttttatcataatcttctttacgatttccaaatcttttaattcctctttcaataaactgttcttgtacataacttggctgatatcttgtataaaaacctttggttgtaaaaaccatataaggaacatgagcattctcaaagatttgaataatatcagcaaatacacttttatttaaatagcaactcataatcacttgaccatcttcatcgcaatattgagcaccatttcctaaaatagcatgacatcttatatcatattgatctaagatagaacgaacaccataaaaatcacgacctgatgcaatagcaaattcaattccattttcttgtaattgctgaattgcttttaaattagctggtgaaattccactttgatgattaataagcgttccatccatatcactaacaactaatttcatcttctctcctccatatcctataccatatcataatccatgctaaaaaacaagagctttcttaatttgtaaaatatttagcactcaaatgttgacagtgctaaaattagtgatataatataagtgtagttagggaaggcctaacagggtagttatttcgttactcaatagattgagtattcaagggttgatttttaaagaaagaggcgatatatatgaaattcctacctgcatttaatgatatgtttgatgatttattccaagatccatttaattattcttctgttgacagtatgcgtactgacatcgttgaaaaagatggaaattatttattgaacatggagcttcctggatataaaaaagaagatatccaaatggaattaaaagatggatatttaattattaatgcaacaaaaaacgttaataatgaagaaaaagatgaagaaggtcatgtgattagacgtgaacgttatagtggtagctgctctcgtaatttctatgttggagatgcagtgaaacatgaagatattaaagcttcatttgataatggtgaattaaaaatcacaattccaaaagatgtgacaccacaagttgaagaaaagaaatttattcctattgaataaaaaaatgatcagctagaataattctagctgattttttaatctctttctttatgatgagaaagaatatttccagttgatgcatcaatatgatattcatattcatcatttctgacttcaaaagaaacttcataataatttttctttaactcaatatccatatccttcgtatcatgagaagatacttttgcatgattcaaagcaatttgttttgcttcactttcacttaatttcacttcaccaacatacttcttttcactctctaaaatcttaccatgacttgcatcaactttatactcatataaatattttccacttacaaactcaatttcatattctaaaatcccatcatctttatcttttttcaattgatagttttgaacatttttaacttgagcatgatttaagaccaattctttagcttgagcttcactaatatttgatgatgaggttgtagtttgatgatgtttttcttttttatcacgttttagaatttgtccactttgagcgtcaatatcatattcatattcaatttcatctttgataaattctatttcataaaccatgacacctttttcatagtctaactcaatttcttttaatgttggttgactgacttttgcatcctgataagcaatttgagttgctttatctttgccaatatatcctttttggcttgcttcaccagtcttatttgtatcaacatcatagcgacttaataaaatatttaattcattgactgataaatcttttaattcttcaaaagtatattgtgtatttttagcaatcaagcttttaattaattgtgcctttcctgttgaaatatggtatttgcttgctaaagcatcaatattttcatcatcttctagtgctaaagaaacaactgatccatctatatgatgattttttaataattgatcaatttcatcagataattcttttcttaagacttcattttctttttgatgatcacccgtaactgaaatcaataaagaattctttaattcactaatatatccttcctttaacattgatccaatcaaagcattcattccaacttctagatcaactccttttaatttcatatcaccaataatcttttgaccatcatcattgttagctttcactttttgaatcatatgttgatcatcaatatctaattcaacacttggattgacatctaaagcaactgttgcatatatctttgaagttgttggccataaaataaataaacaaataaccatacttacaataactacaggaatcatataatatctttgtctttttttctttgtcatttctatcataaactgttcatcctttcgttgttttaattcctcatgaatactctctaaacaatctggtgtaatctcttgaaatgttttatataactctttcatcttcttccctccagacttttctcatttttttcattcctctacgataacttgataatgatgtagataaaggtatttctaatagttttgctatttcaatatgttttaaaccccataatgaatacataataatgatttctctttcacgatcatttaattgttcaaacagttgttctaaaatcatctttgtatgaatattaatattttctggtaaagcgatattatcatcatattgttgatcacatgtctttcttcttaaatacaaataacattcatttcttgcaattgtataaatccaagccattggttttttcatagaaacatattgttgactagcaagatatatcttaatatatacttcttgtaaaatatcacgactatcatcgtagtttttgataatactcataatataggcaaaaacaatggtttttgttttttcatataacttatcaaaagcattatcattttgggggattgttaaaatcaattgatctaattctttattatccatatgcatatgtctcccctttcaccttattaatgcaaaaacattacttattattgcatttattttatttttttcatcataacaaaaaaatctcttaaaatcagcaattatgcttaagagatttcattgattcattattttgactttgttcatagacatgcatgatttgttgaataaaatcatcaaattctttattttctaaacccgttatttctaatatatgataagcatcatgatcaactgtttgatattgaaccattgcattatgtaaagtattttctatatttcttactttataaactttatgatctttgactgtcaaacgatattcacaatattttttgacaaaatatataaattgagcgcttactaattcttttttgattggattattttgaaaatagtataatgacggatgattgttgacataattattaagatagatacttgatataacaggcattttaatattcatatccatatcaaagaaaggattaggattatccgtatgtttactcagttcatcataaagacgaatagcctcaagaattgcgacatcagtataaatcatcattgagcgtggtatcattaaatcaaactgatttaattcatgaatataagctaattgttcatcaatacatttggcatataactcatcaatatgctccactgtatacaatatatacttgtctccttctcctataattgttggattccttttttgaagttcttcttttgaacatttaccataatatattgcattctttggaaattcatccatcaaaggaattctttcttttttcaataaatctagagaagttaaaaaatcataaatatacattatttgtctccttttatacttacatttgtattcattcctattatatcagtagttaaactagttatcaaataaaattctatttaaactagataataaacttgttaactttgattttcgttataatcataataagtgaggtgaatattcatatgttaaaaattggagctattttagcagcaaaactagaagaaaaagatttatctcaaaaagaagctgctgcacaattaaatattaatcctaaaacattttcaacatatgtgaatgatacctattttcctccactagatgttcttagtgatatttgtcgtctcttagacatagatatagatcacttattaggattagaaaagaataataatatggatttgttaattcaaggaaaagatgaagcaaagataatttacttttttagaagtcttaataaaagtgatgccaaattatttatgaagaattttaattatattgttgatttaatcaatacaaagaatcacaataaataagttaacttttagcaatttcattataacatttatatgttttatttgcaataagaaaataagtcatctttccagatgactttttaaaatacgtattttgttaataccattgctgctcctaagattgttaaaacaacccctgttgcccgatttaatgtttgaggctcagctttattagcaaataatgcagccactcttgcgccaactaaagttgcaactacacaaacgattaaagcttccatatctggcataccacctaatgcaaaatgtgaacatgctcctgtaaaagcagtgaatgccataataaagacacttgttccaacagctgtttttaattcatattgaagtacagatgttaaaatcaacaataacatcatccctccaccagctccaataaatccacaaataaatccaattaaacacccacaaattaatgattgaatagttttttgtttttgcgttttagctgcttgtgcttctttggttgtcataacaggacgtacaataaatttaatccctaataataatgtcatcacaactgagaagcctcccatcgttccacttggaacaagcgaagcaatataacttccaatcaatgtaaaaattaaaacagtaattaacatcaccaaaccatttttaatatctagattcttatgttttccatacgtataagctgatatagctgaagctaagacatcggatgcaagagaaattccaactgcagcataaggatcaaatcctaaataagtaattaacattggtgaaatgactgctgctgcagatagtccggctaatcccgttcctatccctgcacccattccagctacaatataaataaaataagcaaacattattttttatcctcctcattgataatatttatatacatgcgtttaaataatgtttttaccatcattctttcttcttcattaaaatcatgatataaaatttcatgaaacttcttttgagcgactaatccatcttcaatcattggaagtgtacgtgctgtcaaatgaagatgataacgacgtctatctttttcatcttggctaacttctaaacaattctttttaaccagtttttcaattcctaaagaagcatgtgatttaataattcctcttttttctacaatatctttggcactatcataacttggattattatgtaaaaataataatatatccaattcaactttggtaagttgatatttgttgcagacttctaaacataagtgatcataaagtttcttcatactattaatcatctttaataattctgtcataatacctccaattagttctattttgaactattatagtataaattatgatatcggtcaataattgtgactcttattttagaattgttcttttttactgtcttatttttttgacaattttttatcataggaagtcgccagttcattgactttaaaggacttttgccttataatcacagtaggtgagttccttcacctggaatatagaaaaatatgaatatttttcttgtccatgctgtaatcattttaagaaagtgaaaggagtaaaaaaatgatttatacaaaagaagtcgaagaaatgtgcattgttgcacgcggtggaaatcatggatgtgctccaattcctgaagaaggaaaatgggtatattcaaaagaaatcaaagatatttctggttttacacatggtattggatggtgtgctcctcaacaaggtgcatgtaaattatcattaaacgtaaaagaaggaattatcgaagaagcattaattgaaacaattggatgctctggtatgactcactcagctgctatggcaagtgaagctttagttggtaaaactttattagaaggtttaaatactgacttagtttgtgatgctattaatactgcaatgagagaattattcttacaaatcgtttatggacgtagccaatctgcattctctgaaggtggattatctgttggtgctggtcttgaagatttaggtaaaggattaagaagtatggttggtactgcttattctactaaattaaaaggtcctagatatcttgaattaactgaaggatatatcaatagaattgcattagatgataataatgaaatcatcggttatgaattcattagccttggaagaatgatggatatgattaaagctggaaaagatgcaaatgaagcattaaaagaagctactggaacttatggtagatttgatagtgctgctaaatacatcgatccaagaaaggaataatggagggtacgaagatggcattatttgaaaattatgaacgtagaattgatcaaatcaacgctgcattagctaaatacgatattaaatcaatcgaagaagctaaagcaatttgtgatgaaaaaggtattgatgtttacgaaattgtaaaatcaactcaacctatctgttttgaaaatgcttgctgggcttacactgtaggtgctgcaatggcaatcaaaaacggagatacaaaagcagtagatgctgctaaaactattggtgtaggtttacaatcattctgtattcctggatcagttgctgatgatcgtaaagtaggtttaggacatggtaacttaggttctatgttattagacgaaaaaactgaatgtttctgtttcttagctggacatgaatcattcgctgcagctgaaggtgcaattaaaattgctgaaaaagctaacaaagttagaactaaaccattaagagttatcttaaacggtttaggaaaagatgctgctaaaatcatctcaagaattaatggattcacttatgtagaaactgaattcgattatttcactggagaagttaaagaaatctctagaacagcttactctgatgggccaagagctaaagttaactgctatggttctgatgatgttcgtgaaggtgttgcaatcatgcataaagaaggtgtagacgtttctatcactggtaactctactaacccaactcgtttccaacatccagtagctggtacttataaaaaagaatgtgtagaacaaggtaagaaatatttctctgttgcttcaggtggaggaacaggacgtacattacatcctgacaacatggcagctggacctgcttcttatggtatgactgatactatgggacgtatgcacagtgatgcacaattcgctggttcttcatcagttcctgctcacgtagaaatgatgggattaatcggtatgggtaacaacccaatggttggtgcaactgttgctgttgctgtagctatcgaagaagcttgtaaataatcatacatttacattttaattgaaaaagttctgattttatcaggactttttttgttttcattaatttcttgatttatatattttctaaagaaacttgctgatatttcgtggaatgtctatggcttttttcaattacacacttcaaaattgtagaattctctttaacaagtcattttcattaatataaaaacttactaaatatcatttttcttatcataataaatatactctccacttattttaattttattatattttttaaatatatatttaaaaaattccattcttttatatagaatggaatttttaacaatgatctatttgaaattaatactatcttctttgcgtgtcttttcattacttatcaatagttcttgtttcttcatatgtctatacaaagctatttccataagtaaaccataaaagaacataatgataaaacaaacaatcaaatttgtatcaatgtcaatatacacaaattttaaaatgagattcaatactacaatattaaataatggcaaaaatacaacaaataaacgaaacaatcttctttcccaatgaagataatcaataattttatcgttttgcaatccctgtttaataagacatttaactgtatttttttcatcatgtttatgacttatttttaaactatataaaaaggaaataaaaattataatcaataatccttttgatatatttttaagattattttgaatatttgaaattttatctagaagcatcatcttatcatagtattgtgaatagatttgaacttcatttaaatcattgttaattttgttttttattttatcatatttattttgaaactctgaacgatcataatttaatatatatgaggatgggactaaatcaatatatttatattgagagctgattttggaatctatatttatatttttatatttgttcattaaatttatacattcttctataggataaaggactaaattatcagcataagcaactgtttgtagatcaatattatctttgataataccactgattttcttttttattgttacactgtgaacaaaatttgttatttctggattaactatttccatatctcgaatgccagttttaattggtacatgtacactcaattcaatcaaagtatttttatctattttatcaatttttatatgtgcattattcaaaaagctttgattaatataaactccatcctcatttggaaattttttaataatatccatttcaagtggtttatttttctcattgtatgttattgctgcgtaattcattaaaggatatccaatatttttattttcattttgaattattctattaaaaataatttgattattatttgataatttgtattgagagaatgcatacttatttgaagtgatttcaatatcagaattcatattcacatatatttgactattttcttgagttacaatttcactcatttgttctaactcactcagattataattttcgtcagcttttttatatacatacaaacatgaatttctattgtctaaatatttttctatatttattcttgttgcatttccgtaagttatagagaaaattaaaagaaataacacgctgggataaaaggcaagtaaaaggatttgtctttttctatctaggtttttgaaaattttcatattcctcttgttattcatattaatccctcctcagtaaataaataataatcatttataattcattaattattatatcatagttttaaagaaagaattatagaattattttcaatattaatcatcgttttggtataatgtcctcttacttgtacatcagaaaaataatagatagacaataatttatcatgaaccaagatttgatcctctggacgacaactcattgcataacaacaattatataaaatcatatttccaaattgaaaatcaggattaatcttttttctttcaataactgtcaatgcactagcaactaactgataatgatctacttgaaacataatatcaactttattttcatcttcctttatatacaaaaaagactcaatttcttgagtcctttagaatcataaatattcaattttaattattaaataaactttaagccatctatttaattttgtattttttcttgttctgtgtttctctatctaacatttcttttatacaaacatctttgcctttttcaataagtgtttcataatattgcaatctatctttaacgtattcgttataagaatcttctagagatggattattcaaatgattatccttcttaatgttgattagttctttttttgcagcttccatttttccttctcgcaaacataaacatagtgctgtatcccaatatctaaagtttttgattttttcaaacaatttaattgcattttcaaagttctttaaactttcagctaatggtaatacctcattttgaataacctgtaaaattatttcacaactttgcttagcaactacttcatctttagtatcaaaagaatatggaggtaattttgtatagcgaagaagtgggttcccatattggcattcccatctttctagttctacagatagacaagtaaaaccacaatacacatcaaatattgaaaaacttttgatacttcggtgtatttcaatataagcaacaataccataatctgaacataaatagtattgttgagtttttcctctttgtttaaatccaagtttctttaattcttcatttagatgaactaacacatagttattgtaaacttgcaacacatcttctttttgaataccaagttcttcttccattggtactctaggatctaaaatcaaaaaaggatatttttcttgaaacttttcatctttatgttttcttaatatttttttaagccaaaacatcttaatcatctccctaatacaattttgtctttttttattatagttcgaagaatttcatctttcagtattctttttactaattcatctcctataaaagatgtggttccttcatgagaagtataaatgagaaaaaccatttatcatatattcttttaaaatatttgttatccatattctaaattgcattgctttttttaaattcactcgatatcccacaatgataatagcatctaaactataaaattctaatgttcttctgacttgtctatttccttcattctaaactaccgagaaatgcttggtagttgcttcatttaccaattcctcatcttcataaatattattaagatatttacaaatcaccaaatattaacttcaaacaatactgacattcctttttgtatcatctaaatcattttattttttaatacaacatcaacattgatattaccatcttttgctttatatgtgataaaattagtttcctatcactcgttataacaattccacttatttaacatactttttatatcatttattatatcacaagatttcaaccaattcatttaatccaaaaagaatataattatatttactaatagaaatctagaaaaagtaacaaacttttttttgggggctagtacgttgcaaacaaacattaaatcatgttattttttgtacacaggcacagactatttaagctttgtaaagactataaaaactttataaaaatatctactgtccctatcaaaaaaacttgtaaataattatctcgagattcttgttattattcattataagcataaccttcccatctttatatctaaattaatatatgaatttttaaatctcaagtcttttttattatttttatgattaatcttgtatagattgtagaataaattgaactgtctgattttgttgctgttgtgaagaaattgttgcttgcccatcaccagattgacaaccatagttaccaaactgtgcatgatttcctcccataataatcatttccttcgtactctttggtaataaagaataattattttgatatttttcatgatttaatacatgatcttcacttccataaatacttactacttttaaagatgatgaagataaatcttcagttgaatatgctcctaataaaattaagccttgaatttcatttaaatgcgaagatgtatattgagctgccattgctccccctaaagaatgtcccatcatataccattcttcgatatctttatattttgcaatcatagaatctgctgcatcaatctttaataccgcaaaatgaaaaggcatttttgcaagaatacataaataaccttgttgtgataatttttgcataagtggttcatatgccaattcatcaacttttgctcccggatagaagataattccctttttggttgcaccttgtggcttgaggacatatccctctatctcctcatcatatatcatattttgattatttattgatacaactgttgtatcggcatgataataatcactgatataccaatatgcaccaccaaataaaagtccaacgacacaaaatataatcaataagatctttttaagttttttattcatttcattcacacttcctatctttatgtatatatactttactctatttatctttaagatacaaatagacttataaatttttgattaaaaaaatatgatttcctattcattaacattatatgattgtctaatagaatagcaacaagaagtaaaggaatattgaatataaattagttaatatgactatactctgcatttcaaatatgaaatcttcccatgtatatagaaaaatatggaataacacttgacttgaagtgaactataagtattaatataacatatagaaatggggagttatttatatgaaaaataaaaaacaaattgatatgttaaatggttctatctgggataagttattattatttgccttaccacttgccgcaagtagtattttacagcaattatttaatgctgctgatgtggctgttgtaggaaattttgctggtggagaagcattagctgctgttggagctaacggatcagtcattaatttactagtgaatttatttgtaggtttatctattggaaccaatgttgtagttgcttcttttataggacaaaaagatgataaaagaacaagccaagcagttcatacatctattctattgtcaatgataagtggtcttgtcttacttgttgttggaatattatttgcaagacctatattagaattgatgtctacacctgaagatattattgatttagcaacactttatttacaaatctattttgctggtatgccttttattatgttatacaattttacttctgcaattttaagaagtaaaggtgataccaaaagaccattattatcattattagtttcaggtgttatcaatgttatattaaatttattttttgtgattgtctgccatatgagtgttgaaggagtcgctatagcaactgtgatttctaatatcatcagttcactgatgttgatctattttttaatgcacgaaacagatgcattaaaagttgaactcaaaaaactatgtattcataaagatattttactcaaagttgcaaaaattggtgttccagccggactacaatcaacagttttttcaatttcaaatgttattattcaaacagcattaaatgctttaggatcagctgctgttgcagctagtgctgctgctcttaattatgaatactttacttattttgtaattagtgcctttagccaagcagcagttacttttattgggcaaaattatgctgccaaaaaatatcagcgttgtaaagatattaccaaatggacaatactgttgagtagtctttctactttatttgtaagttttgcttttattttctttcataagttttgtattagcttctttacatctgacttacaaattgccaatcttgcctatacaagaatgtatattgttttatcatttcaaattatcaatatggttattgaacttctatcaggtttcctaagaggaattggttattcaagtattcctgcacttatttgtgttttgggaatctgtggaacaagaattatttatatttattctatttatccttctattgcttcttataataatttattaattatttacccaatcagttggattatcaccgcattagcacttatatgtgtttatctctttattcacaagaaagtctatcaaagtgcataattttcataaatgtttctaatagcatataaattgatttgaatacaaatatagttatctttaaaatgtatgggcatttcatcaaatataagagcttgtttaccttgtcatacatattttataaagcccctcaactcataataaaattgtaaaaacaattgatttttatgattggaggggaggacgtttttatagcatttatcttataaaaaacctctcttatgtagaaaaaccagagaataagaaacactatactaaacttcattctacttgaatattatatctatatgatataaccaagcaaatgagcaatgtatattcatctatacactgctcatttatattttatattaaaccttcagctaaaagttcaaccatatgaataggttgtttcccaccaagttttatacctttttcacaaccattacaataaaccgcaatatgttgcgttgtatagtgttgacaccattgctgcatatgttgaacttgttcttcttgagataataaatgaagatgattttcaataatatcatgaaaagtctttggagcaatttcaatacaatctttcgctggtggattattcaaccagacaccacaatattttgtcttgtcataattttcttccatttcaacaattgtataattcattttctttaaacattgtcttacagccgtttgtaaagcaatgttttttcttgttcgccaacaatcttggattgttatggattcgccatgatggtcaacccatggaaaatgttcatcttttaaaatatattcatataaactcatgatttgtgtatgaggatatgtttcttctaaaacaagatgacataaagtacaattatgaacaataatatcattatcttctaaaaatttatctttgttacgacaacattgatcaataatggctcctttttcttgcatatatttttgaatagctaatagtgcttgtggatgattcttcttaacatcacatcctggtaaataatgtaacatgttcattcattcccttcttttttataattcatttgcatttgttttgataagattttgataccaataaaatgatttctttttctttctttgaaaagttccttctccttgatcatttaaatcaacatagacaaaaccataacgttttttcatttctcctgttcctgcacttatcatatcaataggaccccacatagcataaccaaagcaatctacataatcgatttcaatcgcatcttttaatgctttgatatgattttttaaataatcaattcgataatcatcaataatagatccatctgtctcttgttggtctatagcacctattccattttcagaaatgaataatgggatttgataacgatcataaatacgatttaaagatattcttaaacctaatggatcaatttgccaaccccatgatgttgattctaaataaggatttttaccaccatccaataaatttccattagccgaatgttcaacgccaattccttcaactaaagaagcataataactaaaactataaaaatcaacagttccttgttttaaaatatcttcatcacccggttctttgtcaaaatgagcattcatcttcttttgataagctaaacacgtattggtataacgtcctcttacttgtacatcagaaaaataatagataggtaataatttatcatgaaccaagatttgatcctctggacgacaactcattgcataacaacaattatataaaatcatatttccaaattgaaaatcaggattaatctttttcccttctataactgtcagtgcactagcaactaactgataatgagctgcttgaaacataacatcaactttattttcatcttccttatatataattcctgcttgatgccatggtgtaccggcaataaacaaagaattaatttcattaaatgttatccaatatttcaccttatttttatatctttgcataaccgttttagcatatctcacagataaatcaatcaattgacgatttctccaaccaccatatttttcaaccaatgctaatggcatttcaaaatgatgtaatgtcactataggttcaatgttatatttcaataactcatcaaagactttatcataaaactttaatccttcttcattaggatattcatcatctccatgcggataaattctagaccatgcaatagacattctataacaacgaaatcccatttctgccatcaaagcaatatcttcttgataatgatgataaaaatccactgctttatgacttggataataaatatcctcatgaacatattcatggatttctcttttctttccatgacttgctcccatttcaacatcattaatgcttaagcctctacctccttcatgataaccaccttcatattgattcgcagcacttgctccaccccataaaaaattcttattcatgattgtttcctccttttgatactgattatacaaaacaacaaaaaaagataaagatacaacagagaaaaagaaaacgagttacgctttttttgaaaaaaaccttcaaatagcgtaactcattatcacttttcttttaatatatctattgatgacactcttgtcacttcggctttttgagaaatatcaattcttttctttaaatgcgtttcataatctaaagcaaaatattgtgaatacaaaatatcaagaatcaattttatactatattcattagaaaacccaccaattttagaatataacttttctcttgttgaaatatgtaagacaacatctgcatatttctttaaacgattatctcctaaactacttattacaataattgatgttcctttgttcttcaatattttcacaagttcacataactgatcaatttctccagaataagaaataaaaatcatacaatcatccttaccaataatagctggtacaaataattcttctccttgtatagaacaaatatgaacaggtacccctattctcatcatatcaagttgaaacatttgccctaacaacaaactataagaaatagccgccaaatgaatatgcttggcatttcttaataaacgaatagccttttggagactatcatgttcaattaaagaaagtgtatcagataaagtttcttgagccaaagctgtcactttactagatatcttttgcatattatcatgacttgtaaaaggataatttggattaatattttgaaaatgtgtatccatataatgaacttctttaagaaaatcttctttaaaatcttcaaatccatgatatcctaatttctttgccaaacgtataattgtccctgtagatgtataagtcaccttagcaatttctttgattgtttgatcttttatatttcctctttcttttaatatataatcaataacattttgttgtgcatcagataattttactgactccacaatttgttcaatcaacataggatcacctcttaacaatcatatcatattttatcaatgaaaaccctatttttattcatttacacatagttatttcatctttactttcttaatgtgtcttcaggagatattttaactatatataatctatttatcaaatatgagattataatctctactaataacaataccaaaataacactatcatttgtaacgaaacttttgtatatatatcatttttaaaataatcaataaaacaccaaaaggaatcacgcatccatagaaactaaaataaagtaactcattaatattcatcttaagaatatccttttctccaagtccattgacttttaaaagagcaaattcttttttctaagattcaaacaatgataaaataagaaaagctaaagaaataatacaaatcaaagcaataagaaaatatctgtttttttcaagttcaacttgaataactcttaatttttcacctttttgaaaagaatcattgacaccaacattaagcttatttaatttttcttttatttgttaataaatgatactattatattttaattccttgtttatacaaataagaataattaatatcaaatttttaaaatataaatataaattatcattaagagccaatttcaaaaacaacattattatcacctattttttagtatctagttctttcttattaatctctttccattccttactatcagtaataactgtaatttctaatgtcgttccatcttttttaattcatatgtttgtgaaatcgtactattcattaatgacaattgaaatccacttttttccaattcttttacatatgaaacaatagattcaaaattatcgtcaactgaaaagcaaattacaagtttttccttcctctgtgaaattatttgtatatcttctgaattttttagatatttaacaatatttttcactttaggaaaattaatgaaaaagtcatttgaaaattttctttagtaaaattagtttctgttttttctattactttttctcactaatattctttacatttgctgttccacaaccaaaaagaagaatagcaaatacaattaaaatcatctttttttcatataatagttccttccttcatctaattaaaataaatgtttattttatgaataaatattttattttccaaaatttgtatatatccaatactattatcaaataaatttattgaactgtacgaatcttcttgattaagattatacttttcaaaatagtaagtatgtgtatcatagtcaaatatataaaaattctctatattataaaaaataattttaccattatttagtttaacagcatctagtatatcactccctggataaattttcggtatttcttgagcaacccttttattttcatttaaagaaaaagttttaccagtttgtatatttggattctcaaaagaataatattattcttatcgccaaaaacaaacataactttattttctaatgaaagttctaaagtgttttcctgtttatctaacaaataactatatatttgagattatccacccaattctaatatttcattctttaatgatataacttgataatataattttttatccattccccccacaatatacaattatattcccattatataatccttcatctatcatttcacattcatgtctatctgttattttacttttgtgtctcaccatatcaaaaatttctaaataacttattttcttattatttttttgaatatccacaatccataggtgagaaaaatcattagttacctgaataagaaaaatatgatactgaaatatttaaaatgtatactatctgtctatggctgatagaaaatgatttttgtaaatattcttttactttattcatcatgctgtttcctgtatacctatgattaaatctgtattcttgttcattcataaataaagtcagatctcttttgctacaccatgatatactcttgtagtagtattattattaatattaccaatgattatattcaatatagtctatgatagtttactttttcatttttcaactgtatttaagtattcaatatattaaatcccttttccccatctgtattaagtattgcatcttgatataatacacaatttctttcaatatttttctttaatgatagacctgtgtagtctttgagtaatcttaacttaatatactagggatagttattctctttgtctgttgataaaactcctaaaatttcctgttgctcactgccacgacctgctttattcttagatttagcacccacattaaaaacatcagcttcatagaaatgactttcaagaagtttatctgaattacttaatgacataagaattctacattttgtttctaaaagaagtgcgctcttataattgacatcaagcattgaacataaatccactgcagtcaatcccttattttcattgaagaaaaggaaaatacctaacaataacttatataaatcaaggttgcagctttgaaagatggtgtttgaaagtagcgaatgttgtttgtaagcgctccaatttcacgagtcttacctgggatatcaatattacagccaaaaaagacattattaatgtgatactgacagtaatctctaccgttttttacgtaacaggttatttcatcatcagaaagaaaaggaatgttaacatcagaaccatcctaagcaagaatatgataactcttaaaagttctatagttatcaaaagaagatgtaaagatatccatgacttttttaaacgccaatacgcttagtttattgcgttgatgtgaaaacgtagaagaaggaagatgatctaaatcaagaaagaaatcacaaagtttagatctgaaagaataaatttgtttctggataggaaatttcattaaagcatcagctaggagtttgcaggaacgagtgaaattagaaacggaatcactgctataacaggcaatattggtagatacatcatgaatagaatcataaagtctgctgagaatagcatcaggtgaaagtgaaataaagtgagtgttgtttgtcataatatgagttctccttaaaaacacatctatataaaaggggcctacaaattattaatttaatttgtaggcccacattttcagatgcctgtcaagaatattgggaaaaagaataaaaaagaacccgatatattttatatctggttcaaaagatgcaatttgcttaacttaatgccattgggtatttttatgcactctaaaatcatagttaaatataaaaagagatgcataacagaaagtagagggaaaaagtcttaaaaaagaaaatttactctttaatgcttccaagacacataaactatatctttttattttttatgttataatacatgtggttattaaagcgtcccgatattcatttgtgatttacccatcgatttgtatttgaatgtgtaggggtgcttcatttcttaagatagtaataaaattttagactctatgtagagccttttttgtggttattataagctttttacctatttatgcccttttaatattttctaattaatatccgctaatccaatctttccccattagtttcaataacttgtttataccaataaaatgaatcttttctgtatctgttatatgttccgttaccttcatcatctacatcaatgtatataaatccatacctcttagatatttgcccagtagatgccgcacataaatctatgcaactccacattgtataccccaataaatcaactccttcatctacagcttctttcatttttgtaatatgtgctttcatatattcgatatgatattgatcatgaatagacttatctgcatttaaggtatcatgtgctcctaatccattttctacaatcaataatggtaattgatacctgtcatatagtgtatgtaaaatatattttagtccttctggatcaatttgccatccccaatcagatgattttaaatagggattcttttttccagatgatagatttcctgctgttttttctccttccttagtagacgttgctacacaatttgaattataataagaaaatgcacaaaaatcagcttttcctttaagtaaatcttctttatcttcttttgaaatatttaaaatcactccattatccttccatattctatctgaatatgaaggataatggcctctcacttggatatcagcagtataaaacaaatcatcttgcattcttttttgagataaaataacatcttgaggattacaagtaaatggataatgaactgcccctgcattcatacatcctattaaattattactatcaatttcatgtgctaattgtacagctttagcactagccactaactgattatgtaattcctcaaataattcctgcttagaatattctgggtgtatctttccaatcatattaataatattaatttcattaaatgtaatccaatatttaactaagcctttaaactctgtaaaacacactcttgaaaactccagaaattcttgaattaattccctatttgtccaaccacccatttcctctatataataaacaggcatatcatatttatataatgttacaattggttcaataccatatttcttacattcttctaattcttttctataaaaatttacacctgctaagttaactccattcttatatccatttggaaatatcctagcccaagaaatagtaagatttaaagatttaaaacccatttcagcaaataatgcaagatcttcttccatatgatgataatgatcaattgccatacgattaggataatattcaccttcaatagttgcatatttagcccctttgggaagttttgatgtaattaatactggtagcttaccataagaaccatcagcatttttaaaagtaacctctctttgtttagaagcatccccacaagtcatataatctgtttcggtaggtcccctaccatcctcgttccatgcgccttcacattgtgctgcagaaatatctccaccccacaaaaaatcttttctaaatcccataaatttatcctcttttctataaaatagtcaataaaactctaatattcgtaaaaattgcgaatccactgattacaatcattataattcctgttactaatccgctcataacttttgattgcttgtttaactcaatagcaaatttaataccttttgttccatagataattgcaaacatataaatacccacacttatcatatagacccaaaaattaggaatagcaaacaatcctaataatgttgaaataactatatcaaatatgaaaaatccaacaaaaaaataatttcttgatttgtcgctatacacattatcgataatttcaatatcataaaatttatgccttttttcttcaaattttttcgataagatttccacaccacaatatgggcaataaatcgaatcattatcaatatccttcttacatttttcacatttcatatgtgtcactcctttcaatttgaacatcaaaggtacaagataagtacctttgacataaacactatgaattaagcttctgctctaattttgcaacttcgtttttttcatatgacttaaagaatggatagaaaatgagcaaaccaatagcaaaatttataataattataaataatcctctaaaatccataccagattgaacaattgcaattaatggtgcaggtaaacaccatggtgtatcaatatatggttttccaacaaatccaataacatatgacatatatgtagttatagaagttactgtgtgcgaaattatcatcggaataaacatataaggattgagaacaattggtaatccatataaaagtggttcaacaattccaaaaatagccggtgctgtacatgtaatagcaaatggtttcatatgttttaactttttagaagttaacaaatagaataaaattggccatgctgaagatatccattgatctaatcgcgtaacatttccaatccaaatatgtggaattggtgctccagcaactgcagcttgaacattttgattcatccatacagttgtcattggcgtagcaattggattaatcatgttatcaccatgtaaaccaacgccccataaacaagctcttaaaaagttaaataatgtgtaagtaaaacaattgtcagccgctcctaataatggtaataatgattcagtaaacagttccgctaaatcaatattcataattgttctaataaaccaacaaacagcagctgtaataataaatgggattaatgctgaaaatgaattcccaattgctggtggaacactatcaggtagtttaattctaatattgaacttgtaacataaatgaattaaataaatagatagcaatgcaaccataattcctacaattaatccaccacctccaaaattagtgacatcgagcgctgtaaatgtagtccctgtaaatcctttagcagttatactttcggatgtgatatcagtaactaatgcagctgttaacgtacctgcatttgtcaaaattaaaaatcccatcaatgcactcattgctgacgtaattgaatcgatgccatattctttaccgaatgatatagcaacagataccgtaacatataacgctaacatattcattgttaatgcatttacattaatgaattgtccagcataatcacttagaaatggtaaaattgtaaccccatccgctaaataatttggtgctgaaaatacaaatagcagcaagaatatcgctcctgtaatagttactccaattgatgcaaccaaaccctcttgaatagctttaattgcttttagattcccaaatttagccattggacctgaaattttgtccataacacccatgaaagaatcaagaactccttttttttcatccataaatatttttacctccctcttttataattttcataatttatataaaaataattatggttaaataaatcttggtaaacttccaatagccgatattaaactaactaaagaaagtaccaaactagctgtaatcatttttttaccaactagttttcctttagaatcatatagtttatacatttcatctttagcttttaatctgaaaaataaagcggctaaagacgataacataacagcaactacaactacaatccccaagcttaatgatatgaaacagcatagtgtcgatacaatcgcaaatgttaatgaaataatactattcttatttattacttttcttttatcaatttcactgacaatagtctttccatttcttatttccttgttattaaatttaacaccacaaaacttacaaaattgactattttctgaaacttttttaccacaatttttacagtacattaaatcttcctcctataaaactcttgcaaatctcgcaattatcataaataaactaaataccatcgctgcacttccataattcattccagatttttgcatatcaattaatggcttattcttatttttaatgaaagctataatttcaaataatattggtatagcataacctatataaaataaaccatctccaatttataatgagatacctagtaaataagcaattactggaagaatagttaataatattaaaacaataagaaaactaaacatagctaataaaccaaacatattctttttgacttctgatgcttccaaatcagctttagctttttttatttcggcgccacattgttcacaataattagcgtcatctaaaagttgtttatgacattttggacattccatttctataaccctcttaactctccacaaatatctgtataacttctgcctttattaaataaagcactcgttcctaaaataaaaccttcaacaccgatagctgatagtaattttattttttctacagaacaagccccatcaatcataactttgtacccaccatatttctttgcttgttcaacaagttttttaaacttaggtgtgacaaaatctagataatcctgaccagcaaagcctggattaacactcattaccaaaacataatcacatagataaagcaaatctttaattgaatcaaaacttgttccaggacttaacgcaatcccagcttgtgctcctgcatctttgatcttttgtagtgtacgacatgcatgcttatctgtttcaggatggatatagataatttggacacctaatcgagcaaaagtttctacataatctcctggatttgtaatcatcaaatgaacgtcacatggcttttttgctttttgacaaatatactcaatatcttgtaatcccattccaaaattagggacaaaacttccatccataacatctaaatggaaaatatcaattcctcctcgttctaaatcttcaatttccttttccaaacaactgaagtcagcacacatcatactaggacataataatttagtcattttcgcatcctccaaatcaattttatttccttacaattcatattattgcataatcaagaattattaacaacattttcaacgctataattattatcgaaagaaatttattgtgcaattaattgcattatggtataatctaaatggtgataaataatgaaaaaattgactgcaaaaacaatagcaaaagaattgaatatttctccttccacagtttcaagggtcttaaacaattcaggaaaaatatctgatgaaactaaaaaaaacatatattcttacataagaaaacatgatcctgattctatttatttgtttcaaaacaataacaaaaggattgtaggtttagttgtctcaaaattgagcaatgaattttttgcaaaaattactgaacaaatagaaaaattattatccagatataatatttctttaattattaaatgcactaactattcttttgaagaagaaaaagcagctatatactcattaatcgataataaagttcaatgcatcatcactctcgctactcgtcacaaagttgtaaatagaagtgaattaaacaacatacctataatctcaattgatgaatcagatccaattatagattcagttcctgatgtacgtgtttggtgtgatcaatatattggtggagtactcgcatctgaagaattagtgtcaaaaggatgcaaacaaattatttttatgactaatattgctccatattttaaagactataaatataaaggctattgtgatacccttaaaaaacataatcttacaatagataattgtttacttgttacttcaggaaattattctaccaacagtattaaagatgctgaattaatgactgaatatttattaacaaaaggagttaaatttgatggtgtatttgctacaagtgatagacgcgcattaggtgtaatgatagcattagataaacataatataaagtaccctgaagatgttaaaataattgggtatgatgcatctacattatcagaaagttttgggattacgtctatttatcaagatattaataatatagccgaaaattgtgttataaatattttaaagtattttaatgaacatccaagagaattggtttataaatctccaattccagtatttttaaagaaaggaacaacgacatagtataaggtgaaattatggcaaaattaacagcaaaaaaaattgcagaagaacttaatatatccccttctacagtttcaaaagtattaaataacaaaggaaacatttccgaaaaaacaaaacaaatagtatttgattacattgaaaacaatactcctttatttaatcattctatgacagttggagtcgtagttaataatttaaatatcgaggtatatgctcaaatcatttcaaacttacaaaaaagtttattaaaaaataatattaatgtaatattaatgactacaaactactcttatgatgaagaaagaagttctttcctttctctcattaaaaaccaggtaaaatgtattattgctataggtactcgatatagcagtatatataaagatgaattacatgagattcccatcatcacaatgacgcatacaaacccaattattgatggagaaatttatgaaagtatccactcagaagaatatattggttcattactcgcatgtgaagaattgataacaaaaggttgtaaaagaattgccttttttactaatgctgttatattagatgaagaaaataatgatagatatagaggatacatagacacactaaataaatataatttactgatagatagaaacttaattattaattcaggtacattttcaaacaatagtattgaagatgcacgtatgatggtcgactatttattagcaaaaaacattcaatttgatggtctttttgcaacaagtgacagaagggcgctaggtgcacttttatcattacaagaacatcaaataaaatgtcctgaagaagtgaaagttatcggatatgatgcatcaagtttatctgttagttttcatattacttccatttcacaagatggtattactatttccaataatattttatatgtaattttaaaactattaaatttaaacacagaatatctagattttaaaaatccatctccagtatttttaatcagaggaaaaacaacctaagtccattgttttcaaaaagtagttatattaatatttaaagttaattatacagctaaataaaaaatgttgatttaatcacaatgttgtcaacttaagatattgatgatatatcatgttcatgtattttaaatactaaaacgaagataagggttccaccctaattcttcgtttttttacgtatatgaaaacatagttttttaatgtttttttgatttagaaccttttctttttattcattggatatttttcgatttttattcctttggttacttcttcctggacgaattgatattatgttttttcttatttcttctatcattttcaaataactctttttctttttacttcatcatattgtctattcatcatcctcaatttgaggtctcataatatctatatatttaaactgaacattttcgtattcaaaatgtagaatacaacaattagtaaatcctccatgcttatcaacaataactggatcaacaacactacttaaaaacgaataacaagcaccaccatgtgaaacaacaagaacatttttatgatcctctttatccataatttcttttaaagtgttagacattcttttcacaacatcttctaagtattctccaccataatgagggaataaatcatcataatcaaacgtaccatctcttttaggatttaagtcttcactttcaccctcaaaagtcccaaagtttctttcttttaactgttttaatcgcttatattcaaccttataatcagttactatttctaaagtatcacaacatctttcagatgtagaactataataatgatcaaattgaatatcctttaaacattctcttgcaacctcagcttgttttattcctttgtttgttaatggggaatcacaccatccttgaatttttcttctctcattaaataatgtttctccatgtctcattaaatataaatgtttagtcatatttctttcatcctttctttattaataaatcatctacaactcattaataattcatatatttcttcacgagttaattcttttggaccagtgctagacactccacaaatttgtgaaacaacttttgcaacatcttttgttaattcatatcccatttcagtaaatgtagttgctagatcagcatctttaattaatcgttctaatgcttcaattccttttaatgcaatatcctcatcattccctttttcgttaacacccataacatttcttgcaaatcttgcaaatttgcttatctcatttttatatacagctcgataatatgctggttgaataactgcaagttgtttaccatgagtcccatgtgagtatgcacctaatgcattttcaatttgatgtgcttgaaaatcacctggtttaccaacattaaataagaaagtttgaattaatgatgcatcccacattaaattagaacgtacctctattgtgtcatgaccattgattaattctttcatattataaatgatatctttcattaatccttcattcatcaaatctgatacgttgaaagttttcccaaaataagtttccatacaatgtgttagactatcaaaaactcctggcataaataccttatatggaacactcataatatattgaggatcttcaataacaaatttagcatatggtccaactaaagttttcttttcatgttttgcttcatatgttgcagcacctaaacagtccatttctgctcctgcgcctgataatgttaaaatgactgcgaaattacccattttttcaggaataatacctttttcaaattctagttcccaaatatcatcattaacttcagttcctgcacaaatgatcttacaacaatctataaccgatccaccaccaacggcaagaattaaatcaacatcattttctttatataatttgattccttccaaaactttctcataagttggatttgctggaatatcagggaaatcaatgatattctttccacactcatttaagacattgacaacatcatcataaattccattttttttaactgacccttttccataagctatcatgatgttctttccataatgtttcaattcatttttcaaatgctgtttaacaccattttctccaaaataaacctttactggcatttgatacacaaaatctctcatagtaaccctccttatattttagagacgatgtgtctcttacacaaaatattataagtgacgctttgtctcttgtcaattgatttttaaataattttttgttataatgcaatagaaggtgggaaagcaatggataaacattttatacgagcaaaaagtcaggaaaacaaaaatatcagattacaacaaattatggatgttacagatcgcttatttcatgaaaaaacatatcatgaaattacactatctgtcattgcaaaagaggtaggtcttgcaagaggtgggttatataaatatgttatatcaaaagaggaaatctttttgatgatttatcttcaaaaagaaaaagcaatgatagatgacatagttgagcaattgataaatgaaaaaataactcctgatttattatcagaagtcatgagcaaaacaatataccaacatttagactttattaaatatcaccaaatattaaatgctattattgaaacaaatgtaaccattgaaaaacttgcagaattcaaagtaaaaacatttgagcatacaaaaaatttattcaatattttagaaaaaacattcaacatagacagacaaaaagcatttgatttatatcttactattttatatcactgtgtttatttatatgatcgtgttgcatatcaaaagaattatgtagaggctatgaaacttgccaatcttaaaatagaagacattaattttgttgaacacttatctcattttatatatactattcttaaataatagaaaaaagttccttctataaaatcaaaattattgctgacatcaaaacaaaacaagaaatatcaataatgatttatccatagttaatatattgccaaaaagacaaatcaacaaaattatctttctacactaaaagctattttttaataattaaatatatatctgtgcaattaaaaaattatttgaatatccacaatccacaggtaaataattaaaactattattaacactgaaaaaatggctatgttaacccaaaaagatgatagatccctgaatataggtgtttatcatacataaatcactctactgaaataaattttattgtaaaatgtatataggatggtgatttatatgaatttagaagaattgaaagtagaacttgaaaatttaaatgacaacgattttgaccaattaattcaatttgttaaagatcataaattaattaatgattacacttcaatattaattgatgctttagaaaagaaatatagtaattcctttgtatgtccaaagtgtggaagtatacatattgtaaagaatggtctttacaaaaatggaacacaaagatatttatgtaaggaatgtctaaaaaatttttcaccttataaagatactattttagaaaacacaaaacttcaaccaattacatggttaaaatatctcattattatgaatgaagatgaagatttacgagattgtgcaaaatatgctggtgtatctttaaaaggaagtttttatatgcgtcataagattatgaatgctttatctcatgaaatggataacataaagttatctggaataattgaattggatgaaatgtcagtcaatatatcttattctggaaatcatcaaaaacaggataaaagtaagaaacttcctagaaaatcatacaaaagaggaagaaaaggaaaaaaacataagcacaattctgaatatacagatgaaatacaaattgcttgtgcaatagatagaaacggtaacttatttttaaaagttgcagaaattggaacaaccactttagataaaaaccaagttattaaggcatattcagatcatataaatgaaaatagttctttatgtacagacggtttatttgtttataggattctagcacgtgaaaaaaagatgacacattttgcgttcacaagcagtagtaaagaaaagagaggtttatatcatatcaatcatataaactatgttcataaaaaaataagagaatatatgaataagcatcctggaatttcgtctaaatatttaaatgaatatttatctcttataggttattttttaaaaaaagagattcataatattcacgatgattttgttaatttatttagctgtaattgtgatttcagaagagcaaactatattggaacaggtttcgccactgatatcatctctctgggttaacatagccgaaaaaatggtgttaatcttgagtgcccaacgatgtagattttctatttgatttataattaagtttgaaatcaaatagaggtattcttatatgtcaaacaaaacattaaaacctaaaaagtgttctctttatcaattcactcagacttatgacaataatattgataaccgcattgaattcttcaaatccatgatatcctaatttctttgccaaacatataattgtccctgtagatgtataagtcaccttagcaatttctttgattgtttgatcttttatatttcctctttcttttaatatataatcaataacactttgttgtgcatcagatagttttactgactctacaatttgttcaatcaacataggatcacctcttaacaatcatatcatattttatgtttcaaaacatcaatccttaatcaatatcaataaaaagaaatcatccatttactaaactttcatccttataattagtccatcatacaactattcaaaaccttcctgtctatattctcaccataaaacataatatatagctgttaaatgctaaaatattatatttaactctatcaataataatattagcttcacttgtattacctgtatcttcaactatgagaataaatatatatctttgatagaatcgttgtattgatgaaatatttctggctattatagattataaaacggggaatcttccacctgttatcagctatacaatgaatttatttattaatgactatatcttatcgctttaaggaaagaattatctttaatattcattttgattatacatatcttttataaaatgattaaaattataaataattgttccttgttcataaccattttcattatccccatagtccttatttactcccataatcttttgaccatcttcaatgatttttccatggtaaacaaacatgtacttatctgaatcattttcaattttattagcttcaattgtaagactatcttcattcattacatctgaagttatgattataatagcattaacattttttatttccgaaataaatctatttgctgtttccttgttattacatacaaaaacgaaaaacaatggtgattttttctcggtaaacaaatgatcaatattataaccttcattaatacaaaatgattgaggataatactgagaatagtttttagcaattttatcatctagtttttcacaattatctgaagtatatgcataaggaatagccataaaagcatttcttaaatataagatagaatccttagcatttattttttctgatagctgtaaaaaatgatgattcacatatgtatcttgtagctgggtaaagaagcttttttcatcataaataagcatattatccttcaattgttttccataattcatataccaactatcagacattgaacgttcagttttatcagctttatttttagctttcttttcaatcgtataatcacctaaataacttgttaaaatatcttgatatttgtatggaaaactattctttttcatagaatcaaataccaaacttgaaccgacaataatgcttaccaacaaaacaactgtaactataactttatgttttttcatctatctcacctcttatctacaccatatcacaatcatgtgtaaaagatatgaaaagagtcgccatcttttcttgataacgactcatttttaaatttattatttaaagaattttttcttttttaatacaattccaccagttagagcaagtaaaccaataaatacaaagaatgcaatttgattcgtatcctcagtttgcgttgatgaagtatgagcaacacttactagatgattcattgctgttgataagttggtttgtgcttcagtgacttctttttggcttgcttcactattagcaacaactgcttttgcttgtgttaaggcagcttcaaaagttttccatgaagtatttgtataagctttttgatctaatttttcagctttagcaatatattcattcaataaatctttacttggtttcatctgtaattgtaagaatgctttgactaatccatcataagcatcattgacatctttttctaatgcattttcattagctaaaactgtttttgcttttgttagagttggatctaatactttccacattacagcaaaataatcatctctattaagtttatcaatttgattgactaatccttttaatgctgttttgtttcctttataaaaatctaattgactcattgcatgagataatttatcaaaagcatcattaacttcaacttgtgttgctttcttattatcatatactttttgagcattatctaaagcagttttcaattcagttacaactgcaggaataactttatctaattgttcctgagtgactttatgtgctgtatcaatagcaatccttaattcttgtctattaactttttcaacaagttgactttgagcatcttctaattgtttataagctttatcaatatcttcttgttttacattagctttaagaatagtcttggcattgtctaatgcttttgctaatacctcccatgattgcgttgtataatattcttgatctaatttttcaactttttctactaaatctgttaatgcagatttgttcgtattataaattaataatgctagtacttcattatatttattacgtaaatctgtttcacttttatcaacaacagattgggctaatttatgtgttatatatgtattttctgcacttttcagtaaagtctgtaattctttcaatggctttgtagctgctgttactgattcatttgtaaatacagcagtatttaaattcttaactagttcaatcgtatcttttaaagcattcttatttggatcttttacaattgaatcatatgttataccataacctagtttataaacattttcagttgttgaatatgtattaacatgttttccatcctgccaattaataaacttaggaatatcaacaggtaatttcccagaagcaccaaatgtacctaaagcgacttctactccagcagttaaattagggctaaaagcagcagttgcagagactgttccaccaccatatgattcagtaatatctaatcctaatccatttgttccaaagactgctaaaatagcatcagcacttggatataattgtgtatcataaggctgatttaatgaaataataacagtctgtttcccattatctttacaataatcagtaaataattttggacatgcagtcaaataactatcatattccatttgcgtagaactagatacctcagaagcatgaattaaaatattacaccaatctaataaatctttatttgttccttcaaaacttgtcccatctgaatttaatgcactattcacattatcattcaaacctgtccaattataatgctgtaaaattttataatctgctccttctggaataataccagctgctttagcacgattccatgccatcacaactctgttattatttcttgaataagtatgggcaaataagactcttgaatcttttgttaatttaagaggtaaaagatcattttcatttttaacaactgtcactgcatgagcagaaattaatctttctgtttcacgattttcaacagaaccaacaacttttgaagcaatagctttcttttgggctaaagttgtcttatcatttgctaaatccatgatccctctgttatattttaaagttaaaattctttcaacagatttatctaattcatccatagataatttaatgccattgtagccatcttccttagtataagcatcaacaaaagcattgattaatggaactaattttgattccatatctttccaagaagaaatatcagtaaatggaatatccaatatatctacaccagctttaatagctaataaatttctttcattaacatcaaagtaattagcaataccacccattgtcatagaatccgtaacaataacaccattaaaattcaattctcctcttaacaaatcagttaaaatttctcttgataatgttgctggaggggttatactttcttgttttttttcagaataaatcttttccttaacaaaattaggaaattgtatatgtgctgtcataattaaatcagtaccatcttttatagcagcttgaaatggtaccaattctgttttatacaattcttccttagttgcaggaactgatggtaatcctgtatgagaatccgttgaaacatttccatgtcctgggaaatgttttgctgtagttgcaactttttgactatgaacaccatcaatataagcagttgtaaacttggcagctaattgaggattactactaaaagaacgtaaaccaataactggattattggcattattattcacatctgcaacaggagcaaagtttgtattaattcctactgcatgtaattcactaccaataattgttccagcttttttagcatcatctaaattatttgttgcccctaaagccatatttcctggcaaagctgttccacctgttaaacgatagacaattcctccttcttgatctgttcctataagaagtggaatattatttttacctaaacttttatccattgcagcctgctgtaaaccatttgtcaattcaacattgatagttgcatctgtgtcaaagttcacagcaaacaaaatcacactaccaatatcatactgtccaatcaattgataaatctcatcattaatattttgaacagaagcaatttttttaccatctttcattgtccaaccactacgaaatgacaacataagtttttgaccaattttttcttccaatgtcatcttgctaacaagctctttggctttttctccattggataatgcactaacatgagaaacatttgcaccaaatacagttgcgcttgctaatgataaaaccattatcagtgcaaaaaatttctttatccctgatcttttcattttattctcctttatctttaattctaataaacgatttgcctatcaattaaactcaagtataaacaatatccaatttccctttctaacctccttttcccttattttgttttaacctgattttaatcatccgatgaaaaatacttaatattatctattatcacttaagaattattctatttttatattgtcgtcaaacatatttatgatatctcattattagaaagttttatttatcaaatatacctaaatttattatatctactctattatccatatcaataaagccaaaaaagaatggatagtccattcataaaacatataaaatatttacttttttgaatatattctttcatctatagaatgacttcaaataactcattaaataaaaaaagacaggttatccctgtcagaattttaacttgatcatcacaaattgaaaaggttttaatacacctatgatataatcatcataattatttaataaaacatcaccttcaatatgatctatactctgttttaattcactaaaattacataaacaacaaatcacttgattatgataaactctttgatatccaaccacattatcatttgtttttaactccacaaaatctccataaattaaaatatcttcatgttttcttatatttatcatcttttgataaaaatgataaacagaatgaatatcatgaatttgattttcaacattaatttcttgatgatcacccatctttatccaaggttttacatcactaaaaccagcatattgattttgattccattgcattggtgttcgtgcattatcacggcttcttaaatttaaaaagtgtaaagcttcatcttgagtaaatccttcttcaatcgctcgtttatactgattgatacttccaatatcatcaaaatcattaatactttctctagtgaaattacacatacctatttcttgtccttgatagataaatggagtccctcttaaaaagaaatacattccagcaatcattgtttttgaataataatgatgatattttttatctttgattagtttatcaatagaacgaggctgatcatgattttctaagaagcttgctatccaacctaatttttgaacttctctttgactcttaaataataattctttaaaatctttgacttgccaatcttgacgtctaaaccattcttcatcttgattaatatcaaagtttgaataattaaaatcaaacatcatagaaaagcaacctttttcgccaataaaaatacctaaatcaggatactgtacaccaactgcttcagcaactgtcatacaagaatatttatcaaatgtttcttttttgagttcttcaaaaaagacttcaatgccaggttgatttcttgtataagcaaaacaagcagacaatccatctttgccatcaacgataccattttgataactttgatctttcttaataaaattaatcgcatcaactctaaaaccagcaattcctttatctaaccaccaattaatcatctgatataattcttttctaacttggggattttcccaatttaaatcaggctgtttcttagaaaaagaatgaaaataatattcatctctacccgctactttttcccatacagaaccaccaaaaacactgcgccaattattcggctcctgactaccttgtttaaaaatataataatcatgataaggactatcaggatggttgattgcttcttgaaaccatggatgttcactagaagtatgattaatgactaaatccataataatcttgatacctttttccttagccttgataatcaattcatctaaatcagccattgttccaaactcaggattcacatcataataatcagatatatcatatccattatcatccattggagacttatataaaggacaaatccataacaaagtaactcctaaatcttgtaaataatctaatttttcaataattcctcttatatctccaattccatcatgattactatcataaaaactcttaggataaatttgataagcaatttccttcttccaccaatcttccactaaaatcacctctttgttttattatacacttggctcataaaaaagacatcaatacatgaaaaataaaatcataaagtagcaaaattgtaaacaatgattgctggtgtatgcttatttatcatgataagatagattcaaggagggtaacaaaatgctcaatgaaaaaataacatactttagaaaaaagaatatgctgacgcaagaagaattagctgaaaaactttgtgtatcaagacaaaccattacaaaatgggaaaatggattaatttcacccagcttagaatatttaattgatctttctcaaatctttagtgttacgattgattccttgattaaagatgatgattgtataagtggagatactcaaacaatgaatacaaatacgcttataacttttctaataaaagctaaaaaaatgacttatgcagcgaaaaagaataaagttcaatcaataaaaaaagatgctcatgagtatcactatcaagataatgaatatcaatactatgatactttttatgggcgttcatacttttctggtcaagagattgtttatcaaaatgaccaagtttgttggagtatgaattattatggaaaagtcttaagttctgattttaatggggactttttaaaagaagctttaatgttggtagatgagcaaagaccttttcgtggacctgaaatatatagtcgaggtgaatatacatatatttctaaagtcactggtcatattgatagttttcaaggtagtgaagaaatatactatcaaaatcataagatctatgaaggcgtatatcatgggggaataattcaataatgaaaaataactatgatatcaagtataatgaaatatttcaacaaataggaaatcatgccaaaattgttttagcaacttctcataatgatagagtttctgcaagaaaaatgagttttattataaaagaaggacttttttattttcaaacagatataacctttcataaatatcaagatatacaagcaaataaaaatgtcgctttatgcatagacaatattcaaattgaaggaatctgtaaagaaattggtcatcctcttgatcaccaagatttttgccatgattttaaaacacacttcttatcatcttatgaaaactattcacatttaaaaaatgaaagactgtttgttgttaagccaacctttattcaaagatggaattatattgatgaaaaccccattattgaacaattatatataaatgaagaaaaatattatgaaaaacaatatttaaaatagccagctaaatactggctatttccataaataatcaaaatagatttgattttgtttttcccaagttgcttcattatgttctccatctaagacaatattgatataactacttgcttgtcttttcagtaaatcttcatgaaattcttgaagatttattattattgaatccactgattttgtttcttttgtaccaaaactaaaataaactcttgtatcaggactgattttaatattttgaaaatcattgaacaattcattatgacataatgcaagagatggagataaacatgcagccttagagaaatattgattaaatttcataattgtataataagccattaatccacccatagaactcccagctatgcctgtacattctctaaaaggaatagttctatacttttgatcaatcattggttttaactgatatacgacccattccatatatttattgccatatccatttctaggacctaaaaaagtattttttaatgtataaggacaatactcatccaatctttcatatccatcatgactacattcaatccctacaacaataaattttttatcataattattaagaaaatcagccaatccccatgatttcccatatgtagcatctctatcatcataaagattatgaccatcatacatatacatcacaggatattcttcattactttcataataatcatttggtaaataaatatgtaatcttctctttttaccaaatggtgtatcaacatcaaatttttctatcatcattatgtctccttttcaacaacaaaattatataatatctcatatcttatgtctaatacctatttataataatttttaaacatttatcttaaattttgtttagaaacgtgtcataaaagaaatgattccaacatatagtagtttaaaaaagaaatatatggaggaaaaattatgaacagtatgaaagaatcattattatcattttcaggcgcaaatgtacctattgatgaagtagccaaaattatgaaaaaagaccagcaattcatcaagattggtttacaagaaaaatggttaccaatcggtattgcatatcaaatgaatgatacgcaagaattttcttattacatttcacctaagaaactttatgaatatactggttatatctatcaaggccaatcattagttaaaaatcatctacaagctaaatataaaatctatgaataattattagaagtcatcttaaatattattaaggtgacttttttatgacttactaaaactaattcaattaaaaaaatattcttattttaatatctcaacttcattcaatatatttaacaaataaaaaaagaagccttacaaatcattaaagatataaagcttctttctcattttatttcatgattctttttttctttttaagaaagatgaatattgataaactacaaaatgctaataatgtaaagcttacaaattgactgttatcttcagttgttactgatgaattattatttatattttcaggtttataattttcatcaacagctccacactcaatacatttaccatctttatactgatgagctaatttattaatgacactacctgtttcaataatagttccacattcaatgcaaactttatcaccagtatatccatttgaagtacaagtagcttcttttttattaactactttaattgtaccatgtccagtagctttaatgattgtatcttgttttgttatttcttttgtacaagcttcatcactaaagtatctatcacaatctttacaatgccaatatgcaatatttccttcttccacacatgttgctgcttttgctttgactgcttcaacatgttgatgtccagtagctttaatgattgtatcttgttttgttatttcttttgtgcaagcttcatcactaaagtatctatcacagtctttacaatgccaatatgcaatatttcccacttccacacatgttgctgcttttgctttgactgcttcaacatgttgatgtccagtagctttaatgattgtatcttgttttgttatttcttttgtgcaagcttcatcactaaagtatctatcacagtctttacaatgccaatatgcaatatttcccacttccacacatgttgctgcttttgctttgactgcttcaacatgttgatgtccagtagctttaatgattgtatcttgttttgttatttcttttgtgcaagcttcatcactaaagtatctatcacaatctttacaatgccaatatgcaatatttccttcttccatacaagttgctgcttttgcttcaactttcacagcattatgtacttctttatcaacaataattttgatttttgcatataaattcgcactatttaaaatatcctcaggtaaaataaatgtacctataaaatcataagtattggaagtatattcatcatattgatcacaattccaattaactgcaatatttcttatagttccatcacttaatgtaactgcaacttcttttggtaattgtaaatcagctttatgagtcccataattcacatgtaaatcatctagcttagtcacttcactaattgttatatcttctttagcttcgcgtagtgatgcatcatctaaccacattttatgatgatcagcatttgtatcattacttgaagtcataaagaatacattcatagctgttggtacacggtgttgtccattaataagaacagtttcaggaactgtaaattcatactcatatgtaaaccattgaccatttctagctaattctttttgagtatcatctaaataatcactaatatatttatatccaccccattgatcatttgcttggtcagtaatttcattattaaagaaatttattgctgtttggaatggacctaaatccataccaccagtcatttcttctctccaatatttcattcgaacacttaaatgataagtttttcctggctggatttctgcacagaaattaacaactggaactttattatttccacttaacttttctgtatctaataaaataacttgtccatttccaccatccacattatttaacaacgatgcatattgtgttggatcttgtgtatcattaccatatgatactaatttagattcagtattaaacccaaagtttcctgaataataagggttcactaaggcaaaaaattgattacttggaataaatcctgttgcattttcatcattaataataaataagttatttgattgagttttaacttcaaaaacaatttgtaatgttttagcagcatcagctgcatcatatgacaaacgataaactcctgttgcatcagcttttatactatcacctatttttactgttgattctttgccatcaggtctttttaaagtcacagtaattggttctttaccatttgaagatgcttctggaacaataaattcatcatctaaattgataactgtataatcagaatgttgtgttgtaatgacaatttcaggaacatcttgtttaagaactaaatttgttatatagagaatatcatctttaatatcattttgtggtaaaattccaaatgagattcctgcaacatcttctaatttaaatttaacactaacttgacaccatccatcgttatctggttgagaaacactccatgctggattttgtggtacatctacaagttgtccatttgaaattctattagctccaccacttaaagcaactgttccaccatgtattgctctaccagatttaaatttcacttgtgcactcataatatattcgccatcaccaggaataatagctggccatccacaacgtggcaataatggtccccaagttggattgttttcatagaaaccaccatcaattgcagcttttgaattataagcaaataccattccagaagctcctgccataccatcacttattgaaaagactttttgtttaagagcatcttttaattgaccaactctttgtccacccatgtaagtattcgaaattgcaggcatacctgttccataatttgtccaagtccatccatcaacaacaaaatcatcaacagagagtccagtcccaattgtttcaggagttttcaaaaatagattaccatcttcctgtggaccataaatattctctactcccgcaatatcacgatacatcatagcaggtttgcttatccatcctaaagtagatggaagttcaccatatacatctcgtgctttccaaattgttttaaaatcttcaatcataacttgaaattctttagcactttctattgcttttgctttttcagcttcttttgttgatagagcttttgtaatatttccaccagtaaataaacgtaatctcatagcagcataatcagcagcaatttttgtcatttcagctgtatttttaaattctttataaagcagtttggcatcatctgcttgaatatttgttgcttttaatttttctaaaaaagttaatgctgcttgacttacttgctgacattgttcaagtgcttgatttcttactttttcatcaatcacattatctttaccattttcttgaaaatccataaaatcccataagttatgagtattatcactccatgattctatcatgcaattagcaatccagtttccattccaaccatatggtaaatattcattactaaagtcagctaatttactaaaagcttgacttaatgtatttgtggaatcttgatataaaaacatattcaagaaactatcataactacttttatctttcatgtttgtttcaacacaccaagataaaccacctgcatatgcaatagcaggatatgttgtaatgatattttgataatgaccagcatcaccccagtttgtcattgcataacctaatgctccattctttttaccagcaatagcagctgtttcagcatttttattcatgacatatgtatttccaacaattgtagaccaagatgaatcaccaggacaaacataataaggaatttgtgctgcttttaattgtgccgtacttgtattaaaatcataatcatgtaaataaccccaatccatagcaattgcatttggcatagccttttttacttgatcatataatccataatgaataatcatatctccccaatacaacatttttttattctttgcttcagaaagattataaataattttcatagaatcaagatataaatctgattgcgttggttctttaccaggatttaattttttccaagcagccacagcacgtccattaactaaatctaaagaggtttcatctccaccaacttgtaaataatctgattgaaaaccatcatcaaataaatcattataaatattttttaaaaaagtttgtgttttttcatcaaatacattaaaggttgttgaaccatttgtatcacctaatgcttgaaaatcattatgcgctatccattgataactatgaccaaaactattttgcgcaggaattaaatcaattcctctttgtgcagcatagtttgagagttctttagcctgagctggtgttagtggatcaccacttgaccatacttgtggataactaccatatgcatatgaaaatccttctagatagaaaaacatttgattgtattttaaatttgccattaaatctataactcgttttgctgtttctacagaaggtagacgattacgtgatatatccatatcaaatgcacgatattgaaaatctggataatcattcgtaatagaaagataaggtaactcatttttagactgccagagaatctgataaagagttgtagctgcataatatgctccttgttgatctttgtatgtaattgaaataccttctccattaatatttaaagaatatccttgttcattcaatgaatcatctttatttaatttaacaacaacttctccactttcttttgaaagagtgatatcagttaaatctaatgtatcactgcatatcttatgaatagctgttaaatcaatattatcactttcaatttttccattatgtaaaacataaattccatcttttgattccatttgtcttggtgatggataaagaagtaaatcatcagctgatgaaatacttttttgttcatagtctattgactttgcatgaacagatgaaataggaaacataccaataatcattgacaaagctaatgatgttgatattatcccttttttcattttcattttaaaaaaccccatttttcaatcctttcccactactttaactaaaaagcaatacaattgaaaaacaataagaatatgggatgttatcgtttgatataaagtagtgtaacattatcactcaatatcaatcatatcctttttacaaaatattatctttgcttaatttcacccatacctccctctctttaaagttataacattacaacctcattatatcatatcttataatgaacacaagtcttattcaaaataatattttaagaaaaaaaacaaatatcccatctttatcataaattatctacaaaatcaaaaaaagtatgatttattcatacttttttataattcttcaccattactttcaataactttcttataccaatcataagaatccttcttatatctttgataacttcctttacctaaatcatccacatctacataaataaaaccatatctctttgacatctcagaagttgacatactaacaatatcaatacaaccccatacagttaaaccgaataaatcaaccccagcttccacagcatctttagctccttggatataatctcttaaaaaatcaatacgataatcatcatgaactttatgatctttagttaaaacatctttttcacctaacccaagttcagcaataaataaagggacctgataacgatcatacaattctcttaaagcaatcgttaaaccaataggatccttttgccaaccccatgtagatgattctaaatatggattttttactccattaacaagatttcctactgctatttctgtattttcatcaatatgtttcttagataaaacactcatataataactaatagataagaaatcacaagtatattgatgtaataattcatcatcaccagcttctttatgaataactatttgatgttctttaaaataacgattcatataacgaggataatatcctcttaattgaacatcagtaaagaataaattcatttgatcttcatctaaacattgtaaaacatcttcaggatgacatgttgctggataagcttcacgtcttgctatcatacaaccaatatgagaatcttgaataatctcatgaccccatttgacagctaaagaactggctaagaataaatgatgaatagcttgaaaacaatcttgatctaaattatcagatgtatattcttttaaaatagcccctccaacatataaactatgtaaaatcacattaatctcattaaaagtaatccaatatttaactttatctttatatctttcaaagactgttttaacatatttctcataaaaagaaattgtttttctatttaaccatccaccataatcaagagctaaccctaatggtgtttcataatgagataatgtaactaaaggttgaatcccatattttaaacattcatcaaaaaccttatcataaaactgtaaacctaattcattaggttcttcttcatccccatgaggaaagatacgtgaccaggcaatcgacatacgtaatactttaaatcccataccagcaaacaaacgaatatcttcttgataatgatgataaaaatcaattcctgttcgctttggataacatccctcttgatcatttaaacaatcaaaaacatcatctttactcatcatatgaaaacaaacataatcctcataatcttgtttatttttaaaataaggagccgtatcagcaatactaggtccttttccatctacattccaagcaccttcacattgattagcagcaattgctccaccccataaaaaattattagaaaaagtcattttattattcctcctatattcttattataaaacgtattcattttataaaaaagaatatacaatacaatagaaatgacttttcgatattttctttattttttattcaaatcacgaaaaatgattttgttaatcatcttctcttaatatttcagttggagcaactttattagcttcaacaatcttagaaagctcagttttttctttaagatatttatcataatccaaagcaaagaaacaagaatataaaatatccaataataatttaatcgacgtttcattactataaccagctatcttactatacatcttttcttttgtcgtaattgttaaagtcacatcagcttgacttcttaaataagattgaccatatgaagttattgctaaaataggaatattcttagctttatacatatcaaccatattcttaataattggtaaagctccactataagaaacaataagtgccatatcattctttgaaaccaatgatgtagaatataaatactcttgttctaaatgagaaataaaaaccttcttaccaattctagacatctttaaagcaaaattttcacctaacaaatgagaaaaactaaccccacaaaaatgaatcatatctgttgactttataagatttaaagcacgacgtaatgtatcatgatcaataagagacaaagtatcatcaattgtttctttctgtaatgttgctattttataagaaatatccataatattatcctgactttgaaaaggaatattagcatcaatttgattaatatgacaatgaagatattctatttcttttaaataagcttcttttaattcaacaaaaccattgtaacctaactttttagcaacacgtataagcgtagatggtgaagtataagtttttattgcaatatcttgaattgtcatatctttcaaattctctttttctactaacataaaatcaatgactgctttttgtgatattgataaatcttttatatttttcattgattcactaactaacatataacctcacctcacacattcaaacttgtctttataaagaaaatattatacatattatttattatgattattttatgatattttttacagttttattttactcttgttgaatgttgtgttcaataataatttgacaaaataagtgaaattatgtgttttttaaaagaaataaaaaaagttgcctaaacaactttaatttgattattgataaaatatctttcaacaaatgatttagctaatgaatgaggttttataacttgtagcacttcttcaacaggataccactttgcttgatcaacttcctcatttaaaacaaattcttcactttctacaataactacataattatgaattaatgtattagtctttttaaaatattcattatcattatattgataaaatccaacatttaatccaacttcttcttgaatttctcttatcaatgcctctttagcattttcacctttattaatatatccagcaattaatatattatcaatatgtccatattgttgaatcaataatattttatctattgttggattaaatacaattgctgatatagcactattaaacattggaaacttaaatgtttcacaatgtggacaatatggaaccataccatcttgttcattttctttaaatatcaattgattcccacattcatcacaatatttcattctatcatcattcctcttttcagttccttatcatatcataaataacatacaaaattcactatttttctttatcattaaagctttttcatgtatgattgtaaaaggagagtggagagaaatgataaaagcaattatttttgatatggatggattaatggtagatacagaagtaatttcatatcaatgttataaagaaattattgaaagttatggttttgattttcataaagcagattatgttaaggattatcctggtaagcctttaaaggcttcaattgaatttattaaagataaatatcatcttgattatgataatcaagagaaaattgaaatctttcatcaattagaaaatcaatatattaataataatggtgttgaattaaaaaagggattaattgaattattagaatatcttaaagaaaatcattatcaaacaattgtcgcaacatcaagtcataaagatcgtgctgaaagaattttaaatcaacataatgtcttacaatatattgatgatattgtatgtggtgatgaagtcaaacgcggaaaaccttttcctgatatctttttaaaagcttgtgaaaagcttcatgtttctcatcaagaagtacttgtcttagaagatagtgaagctggtattcaagccgcttatgatgctcatattccagtgatttgtattcctgacatgaaacatcctagtgatgaatatgttaaaaaagttgaacatgtctatgattcattaaatgatattattttgtatttaaaacacctctaggtgttttttattatgatgttttgtatcatatcatacaagaaattagacatcaatcatgttagaataaacaacatatagggaggtttattatgttatcaaagcaagaacaacgtcatatctattatgatcatgacttaaaaatagaagcttatcagttaagtggaattgtccaaaaatttcctaatcactttcatgaatattatgttattggttttataaagggtggaaggcgtcatcttcaatgcaaaggtcaagaatatgatcttgctagtaaagatatgattctttttaatcctcatgataatcatttttgtgcacctattaatgatgaattactcgattatcgtgccgttaatatcaataaagatatcatgcaaaaaatggtatatcaaatcacaggacaagattatctaccatatttcaaacaaaatgttgtctatcaatgtgatatctctacatctatagatgaattatatcatgcaattgttcatcaagcagataaacttaaaaaagaagaaacctttttctttttactagaacaaatcttaaaagattatagtgctccttttcaagacgttgcattaccacaaccacgcattgaaattcaatatctttgtgattatatgaatgaacattatcaagaaaatattaatttagatgatctatgttcaatgactcattttagtcaatcttatttattaagaacatttactaaacaaataggaatttcaccatatcgttatttacaaaccattagaattgatcaatctaagaaattattagaatctggtatacctcctgttgaagttgctcatttaactggttttagtgatcaaagtcattttacaaatttctttaaagaatttattgggattacacctaaacaatatcaaaacatatttaaagaaggtgatgatgatgaataaatggatgtatggtcatttatcagcatttatgacaatctttatatggggaacaacctttatttctacaaaaatattgttaacttcattaaccccaattgaaatcttattcatccgttttttaattggttatataactctatggcttgtctatccacaacgtatgtcattaaaacaagaacaacatgaatattactttttagctgctggactttgtggtattacactctattatctttttgaaaatattgctttaacttatacactagccagtcatgttggtgtcattatttctattgcacctttttttacagctattcttgcttacttcttttcggatgagaaaaagcttaacattcgtttttttattggttttataattgcgattataggagtttgtatgattagctttaaaggtgatgaaagtttaagttttaatcttactggtgatcttctggcaattattgctgcaataatatgggctatctattccacattaactcaaaaaatagcaagtttccaatacaataccattcaatcaacacgtcatatgtttttttatggattgatttttatgttaccatttctattgattatggatttttatcctaaaatatcaacccttatcgatcctttaatcatatctaatttattatttttaggattaggcgcctcagccctatgttttgtgacttggaatttagcagtaaagattcttggtccagttaaaaccagtgtttatatttatattgttccagtgattacagctgtgacttcatttttgattttagatgaagctatgaatcagatgacgattattggtattattttaacattgataggattatggttatcagaaaaaagaacaaaggagaatcaggataatgaattatgcaaattataaatgtgtaatggttttagatgaagatttacctcaaggtattttatgtaatacatctgctattatgggaattacattaggaaaatatatagcttcaacagttggggaaaatgttgttgatcaagataattttttacatctaggtattattcaatttcctgtccctattcttaaagcttcaaaagataagattaaagaaatcagagaaatgctttatgaagataaatatcaagaattagtggttgtagacttttcagatgttgctcaaagctgtaatgattatcctgactttattgaactcatgaaaaacacaaaacatgaagatataacttattttggtattgctatgtgtggcgctaaaaaattagtcaacaagctaaccgggagcttaccattattaagataaaattttcctaattaatcgataatttctcatttatattgagaaattatttttttatatcaacaatgaattgcacttttttatcatgacttttataattaagctagaacttatagacaaaggagtatattatgggaaaaattatatttattgatgttgatggaacattgttagactatgaaaacaagttacctgcttcggctgatttagctattaaaaaagctagagaaaatggtcatagagtctatatttgtacaggaagaagtaaagcagaagtttatgattacatctgggatattggattagatggtatgattggtggaaatggaagttatgtagaagatcatgatcatgttgtgatgcatcagttaattaccaaagaacaatgtcaacatattgttgattggttaaaagcaagacatttagaattttatctagaaagtaataatggattatttgcaagtgaaaactttgaagaaaaaggtaatccagtgattaaactttatgctcaaagaaaagggaaagatgacgctgatcacgcgactgtgagaactattttcccagatatgatttttggtggagaattatatcgtgatgatgtgaataaggtgagctttattttaaatagttatcaagatcatcttgattctattgaagaatttcctgatttaaaacctggaacatggggaggaaaaggtgaaattgcattgtttggtgatttaggtgtaaaagatattaccaaagctcatgcgattgatgaattattgaagtatcttggtgcgaaaaaagaagatacattggcttttggtgatgctaaaattgatattccaatgttggaatattgtgaaattggagttgctatgggtagtggtggagatgaaatcaaagccatggctgattatgtgactgatgatgttgataaagatggtttatacaaagcgtttgtacactttggattaattgaagaatagaacaaaaaagtttagaaagcatatatcaacgttttctaaactttttatattttcatcaataaatcactttttttacagtatgccaatgaattgaaataaagacatcatgtaaaaaactttgtattcttataagtacaacaatcatttattttgaatgaggcatttccccagcccactcaaatccttttttagcaatgatcacagcaatcaattcattaataaccgctgcagctgcaattgtaccttgaataattttggcacactctggggcaggacctgctaaactagaagctgcaattcctgtaaaaactaaggaaacaccagagtgaggtaataatgtcaaacctaaatattttttaaccgtttgtggactatgggttattgaggctccaaaataagcaccaaaatactttcctaaagctcttgcaataatataaattgcagtgaacaatcctgcttgaaagatcaaatgataatcaagtggtgctcctaaatttaaaatcacaacaacgattgaaaaaccaagaataggattgaattgtttcataagtttatctaaagcggtacttgttatgatattagaaaaggctgttgaaaatgccattccaattaacataaagtttaaaagtggactaggtaacatatgataattaatgatcattccaataaatgatgcaaacaaaatagaaatcaataaaacaataaatcttgtttgaaatgatttcactttattcataatcaatccacttattatcccaacaacagccccaataataagtggtaaaataacaaccaatacactcatataaatcggtatatcttgagaagatatatgactactcacaattgtcatcgtcgtaaagaaaacaataactccaaccatatcatctaaagcagccataggaattaaagttttggtaactggaccatctgtcttaaattctcttacaatggataaagctggagctggggctgttgctaaagcaatacctccaaataaaaaagctaaataaagtggaatattcataaaatagaaagtgagggcaaagacaagagaaacaaataaaaatgttcctaatgattgggtaagtgttgtaatcataatttgtttaccagcactcttgatctttttccataccaactctgttccaatcatcaatccaacagcacattccaaaatatgtccaattctttcataaacaactgaatttaataaagattgattgattaatcctaaagcatgaggacctaagatcattccagctaatagccaacctaaaatagctggtaattttatttttgaaaccaatttacctaaaacaattgctaatgcaaaagcaattaaaaaccttataatcaacatgattagacttcctttcttacaatgccataaaacatcatatcaaaccactttaataataattcttcatgttgatgaataatttcatcaaaatctataccttcttcaatcttttgacaaaaataatcattaaatgaattttgcataatattataatattctaatgctgtttgataagtgatgttctctcttaactgaacatgatttaaagcatttttaaagaccttaagatttaattcattaaaatccttttttataatagctacttctcttttcaaatgttgtggtgttcttaaaagcgtattaaaaaagattccccgcaaatgtggatattctttaaaaaaagaaattctatactgcatatatatttccatattatattcatctcttgtcgcataatgttccatcattttttcaaaacatatcctaacacattctaaatacaattcatctttatctttaaaataatgataaataatacccttagaaatatttccgatctgacaaatatgattcattgaagctttctcataactcttatcattaaattcctgcaaagcactttcaatgattttcatccgcataacctttgtcatttcttctcttttcatattatcttcctttcattgaccatgtggtcaatatttattatagcacaatataaaaaaatgaaaaggtctattactaactcttttcattcttgatttacatttattgtatgatagaaacaataacattgttttgtctgtttagcttgatacaatgcttcatcagcatgagctaatagttcttcaaatgatttaccatcttgcaaatagagagcaattccaagactattagaacaagtcattttgtcattatgacaaaatagtaaatcattgattcgttctattaaatattgttcattctcaatattttgtacaaaaagaataaattcatcaccaccaaatctccccacaatatcatcttgatgaaatgttattttaagtttttcagataattttaatatcatttcatcacccattatatgaccataagtatcattaacatgtttaaaattatcaatatctaaaacaatcaaagcatgcttttgttgtggatattccttcaatctttttttaataaaatgtgcagcggattgtttattatacaaaccagtaaatccatcatacataatagctgattgtaaggcaatattctttctttttaattgatcaataccagtattgacccctatcatctttataggaacaccctgatgtataattggtgtaacatctaatttacaccatttaaactctgaatttcctgctctcattctagcttcataggatgtacttttgccttgaaaaatagattgaaaagcttgattaatgacttcataatcatcaggatgtgaaaaatagagtgatactgctttttgataatcttcaggagtgaattgactatacttccttacatcatttaagattttttctcctgggacaccaaaaatatcttcagaattttcaaagactgtatataattgattgacgatatctacttcaaaaacacatacattagcagcctttaaagtaatatcaagtcatatcttataatcttcaagttgattttcataattattatctattcgcatattatcagatatcccttctttatttcattatacaagttcaaagaaatacttgcaatgaaatgaaatggatctaaaaaaaagaccagttaaactgatcttatatatgatttcttctatacttcgttgacaaatacttttgtttaggtaatgaactgttttttaagtctattcacttatattcaattaaaggagaatttaattgaacatatttatttatataataatgagatattgtataatggttttgattagtaatgattaacattgtgatatcattagttcctttttgtacaaatatatctttatcataagtaataagtaatgttcctgttttaaccaaatcatttacatgaacaaatattttaaaattattaccattttcttcaaatgtatcaatccctacatgaattaaaatttctaatccatcatttgatataatcccaattgcatgttttgttggtgctatcatattaataattccattacaaggagaataaatttttccttggtttggaataacagcaatcccatctccagtcattttagaagaaaaaacttcatcaggaacttcttcaattgcaatactttctccctcagcgatagaaaaaagcgttctaatctttttctttttaaatatatttatcattttatttaagttcaggccaataatctttattagcaataatcatttcatctagaatttcttttgcaactgttgctgaagggattgttttattcatcgtaaatgctttaagtgccttgtcataagagtgctcaatagcagcttctaccaaaagtgattcgcatgcatcttgttgttcaataagtcctttataaaatacaggaatattccctattcgaattgcttctattcctcttgaagtaatatatccagggatttctaccatagcatcatcaggcaaatttttaatagctccttgatttggaaccataacaatttgtctagagcgagaatcattggctaaagattctacaatatcaacaataaaccctccatgtacaccaacaaaaaattgacttaaatcaatttttactcctctttgatacgcttctacagcatcaaaaatacgtttttcacgaccattcataacctgccttgctcttgtattattgatattttcattttctaaaattttatctggaaataaataatattgcatatatgtatttggtaaataatctttaaataaagaaacaatatattttgaagtttcaaatgtatgtgtccatgaaggatcttttactaaagcattttgataactggattgagacaaatacccatattgactaacatgcttttttaacttttccgtaacatcaattccattttgtcttacttgagtataccaaccaaaatgatttaatccaaaataatcaacttctaaatcaccaagttcacaatttagtatttctgccattcttgcttctatttctacaggcatatcacatatattaagaattctagcatgaggtcttaacttttctgtagccttagcaacaattgcagcaggatttgaataattaacaatccaataatcttttgatgcatatttctcacaattatcaatgagctcaaccattggataaattgttcttaaaccataagccattcctccagctccacatgtctcttgaccaataactccatgttttaatgatatctgttcatcaatttctctcataggtaattttccaacacgcatttgagccaagataaaatgagcatctttcattgcttcttctacatctactgataattttaaaggaatttctggagcaaaacccttgataacttcattgacaattattgcaactttatcctgtctttctttatcaatatcataaagccatatttcttgaatcccaattacatccttcttcagtaataaactttttactattccagcagtataagtactcccaccaccacaaattactatttttttcttttccatgtttcatatctccttttattttgttaacctcattatggattatatttatagatattcaatatctgcgtctttattgtgttataaaataacatatatatgtgttattttagatatccttgtaactattagtaacaaaatcaaattataattatcaatttctctattgtgtaatataataaatataaataaaaatcatcattaggaggtgatttcatgcttttagatcaaataaataataaaacattatttaatcaaactgaaataggaattgctgattatcttattaaaaatattgataatattgaaagtctaactattcataaactagctagtgaaacttacacgtcaaatacaacaattataagattttgtcataaattaaatattagtggttttaaagaattaaaaatacgattaattaaagaattagaaaatctatataagtttcaaaataatatgaattttaatcttccctttaatgaatcagattcacttaaagaaatgtcttttaaacttgcagaaatcggtaaagaaattatcgaattatcttatatagaacttgattttagttctctaaatgatgctcttatgaaaattgaaaaggcaaaaagaatcttcatgtttgccaaaggagattcctatattaatgcattacatttttacaataatatgaaaagaataaataaatatattattttatctgattatcttcatgcttcttcatcaaatgttttaaatattacagtggaagatattgcaatatttttaacttatagtgggaataattatgattatacaaaatatgcattataccttagaaaaaagggcatccctattattcttattacatcatctacagattctattttagcaaaaattgcatctacaacattatttgtaccaaatcgagaatcagttgattcaaaaattgctcctttttcttcacaactttctacatcatatatacttaatatcatatattcatatatttttaaaaataattacaaaatgaattatgaaaataataaaatgaaagataaaattgctcaagaaatgcttcttaaaaaaggaaatttgaaataagtatattaaaaatgaggaaatggatatattgataaataatcaatcatatcattttctcattttttatcactcttgtaaaagtaaatttaatttatttctttcgctaattattgattatatttgttcatttgtaagagaatcaataaattcttcaaactcactttttataacggcaacttgaggtccatagacaatctgtattccagttcccttctttaaaatacctttagcccctgtactttttaatttatcatcatcaacaagttgcatattgttgactgttacacgtaatcttgttgcacatgcatcaatatcaattaaattatctattcctccaattccttctaaaagaatttgataaataatatcagtactttgttttttatttttgtaatcttcttttgtatataatttaacttcttcatcatcatttcttcctggtgtagctaaattaaagtgaagaatcaagaacttaaatataaaataataacctaatgcataaataatgaaaattggaattaatctaggccaatttgtttttgctgcaccttgtaagattccatatagcgtaaaatctattaatccacaagaaaatgttgttccaatacaaatattaaatatatgcatcaataaaaatgataagccagcaaaaacacagtgtaaaagataaagtgctggagcaacaaataagaacgtaaactcaattggctctgtaataccagttaagaatgtagttaaagcagctgaaaataataaacctcctactaattttcttttttctggtttagcacacttgtacatagcataagctgcacctggtaatccagccatcataaatgcatatttaccagtcataaaccttgttgcttcaacactaaattgcactgtatttggtgaagctaattgtgcaaagaaaatattttgtgctccttgtactgtaacaccatcaataactgctgttccaccaagtgctgtttgccaaaatggtagatagaaaatgtgatgtaaaccaaaaggaattaatgccctttcaataaatccaaatatgaaagttccaccatatccagacttattcacaagaccacctaaagcaaaaataccattttgaataattggccaaatataaaatgaaactatcccaactagaatgaaaacaagtactgaaataatgggaacaaacctaacccctgaaaagaaagataaagcaactggtaatttttgtttgtagaatctattgtgcaaagcagcaactcctagtcctacaattatcccaccaaaaactcccatttctaaggaagtaatacctaatacacttgatacagaaccacttaatactttctttgaaaaagttccatctgctaatatgtaaccatttaaaattaacatggcatttattgtaacatgcatgacaataaacgctattgctgaagataatacagcaactgccttctctctttttgccatacttaatgcaatagctagtgcaaaaataagaggtaaattatcaaaaatagcagaaccaactttagccataattgtcaatagtatattcaaaatcgttccttcacccaaaagccattgaagattataagaagcaactgtggtttgatttgtaaaagatcctcctaatcctaaaagaatcccggctattggtaaaactgaaattggtaagaaaaacgctttaccgattctctgaatgacagaaaaaaagctattttctcctgattttgactttgttttttttacgatatttttcatagttttctcctttcttttaatactttttattaacgattgttttgttatatcactatcctttctctttcacacagcattctgtttatcattaataaaaaatacttttctctatgaaatcaattccattatagtttataaaaaagcgctttcaatcctttgcaatgcttatgtatcataaataacaaattataatcttttaaaaaatatccatgttacttttagtatcaataaatcattattttgaaatatctaaacaataaaaaagatacagttatttctgtatcttagatgtttaatataattcatttcaacttattcttgatttaaatatgctttctctaatgcttgttttatatcttctattagtaattctggttcttctaaacctaaatacattcttatatgtccaatattcaagcctctttgttttaattcttcttcattattccctttaaaaactggcatcgcaagactttcaaagccaccccaactataggcaagagtaaaatgatttaaagaatcaataaaagttttaataatttgaggattagcatcctttaattcaaatccaagtaaactactataaccttttaaataagttttagctaatgctcgttgtgaagatgaagccgctaaaggatgataaacatgttgaatacatggatgattttgtaaataagtaatcacttgtttggtagtttcttgttgtgatttcatacgcacaggcaatgttcttaaacctcgaatagcaagccatgcattcataggagccattgttgccccaacaagaatttgtccaaagtcatcaatcttcttcataagtttctggttggttacaacaatgccaccaacaatatcactatgcccaccaatatacttagaacatgaatgaatcacaacatctattccatattctaaaggattttgaaataatggggttgaccaagtattatcaatgactgtataaattcctttttcttttgctacgtcagcaatcatctttaaatctaataattcaaatttttgtgatgatggactttcaaaataaatcatcttcgtattatcttgaatataatcaaaaatttcacttgtttcacaaacatctattttactactttcaaccccaaaacgttttaaactttggatgagttttactgatgaaccataaacagtattaacaataatcacatgttcatctttattaattaaacttaagattgttgcagaaatagcccccattccagaagcataacttcttgcacattcacctttttctaatcttgcaattttcttttctaagatttctaaagttggattatctcctcttgtatatgtataggcatgttgtccatgagcattcacctctacataatgatcaaaatttttaaattgaaatgttgatgtttgaactatctccggtgacacacttaaataattcttttcccagttatgttctacttctaaacaaacattatctaaatctctcattttttatacctcatttcttattttctttattataacataaaaaaactactcacaaagagtagaattttatgcatcttcttgagttactttcaataaagttatcattaataaaattaaaccaatccctaataaaatatgcccaattccagctatcccagaaattgctgcactcataccacttgttagtgtcatagtcaaaacttgcgtcattcctcttataaccatcataataacagttaataataaaccaatattataaattaccataaactgtgaaaaacgtttttcttttaataatggcaagttttttacaaacaaggctaaaatcataaacataaagacacccagtaccattaaatgcacatgaacatcagcaagtactgttactcctgtaaaaccattaaactttgtaaactcacgataaaagactccacctatcaatgctaatataacataaaagaaagctattcttatcatctttttcatatttagtcctcactttctttattattataacgtagagtttttattttttaaatcaatatgcttatagaattataaacacatacaataaatgtgtgcacaatcttccttcgttaattgacgatatgctcttggtaataagttttctttcttagttgctttttcaaccatttcttcaattggaagatttttaattcctaattcagataaatgaacaggtaatcccaactcatctttaataaaattttgtaaagcatcaattgcttgatatgccactgccaccttatcatttccatcttccacacccatgacattgactccaaatcttgcaaaatcattcgcaacactttgatctctatccaataagtatttcatccattttggagttaaaatagcaagtcctaatccatgagttaaatctaatgtcgaagaaaattgttctaaagcatgtaaagatgcttgtgttttaaaacctgatgtacaaaagctattcaatgcccaactggctgcccaaagcatggttgcacgtgcttcgtaattttctggttcttttatagctatcggtaattgttgacgaactgtttttaaaagagtttccacaacattgaattgtaatggatatttatcagcattaacaaagtaattcatatcaaacaaatgagccataatatcaaaaccaccacatgcagtttgatgaggaggaacactaaaggtatttgtaggatctagaaaggctgctttaggtcggatagcttctccattgattccactttttactcccagttctacattagcaatgacacatgatttatccatttcacttcctgttgaagcaattgttggcattgcaataactgccaaagcatctttccaagatacttttccttcaatcaaatcccaaatattatcactatctgacaatgctgttgcagcaatcgctttacaacaatcaatcgttgaacctccaccaatggctaaaacagtttgaatatcattttctttacagatcttaacacctttattcacagttgtatgcctaggattaggttcaactgctcctaattcaaagacttggatatggtttgattcaagttcatcaatgacgttttgataaagtgatgaatttttaataaaattaccaccatgagcaattaaaactttgttaccatattttaaaacttcttcatgtaaatgtgataattgattttttccaaaatagacttttgtagtgttttgaaattgaaaatcattcataaatcttcctccatttctttcatttgtctacccatctcataagcagattgataagccgaatgctttaaaacatcaccctttaaaaaggctccagctccattcattatacctgcttcatcaacagttcttaaaacttgtatgaaacctcttaatgattcaatagttgctgtatgttcacttaaattcaatgctccacttgttataatgtaataaacctttttacgtttttgactttctctcatttcatattctcttgcaaagaaacgatcaatcaataatttcatttgtgcactgatactataaaaataaactggtgaagataaaacccatatatcggcatctatcattttttgaataatctcattagcatcatctttttgacaacatatattttgatgtctacgacaatattcacaagctagacaaggttgaattgtataatcatttaaattgattttttctacttcacatcctgcttctttagctccttttaaaaattgattacataatatttcactatttccatttcttctaggactcgaagaaataatcacaactttttgacgcatatgacctctcctattctggctttaatggtccatagaaataagaagccgttgctccaccatcaattaaaatatctgtgcctgttataaaagcacctttttcactcatcaataattcagcgacattagcaacttcatctgctgttgctggtctacctgctggacatttttcaaacatgtttttataaaagtctcctcttggtccattaaattcatcgattgctaaaggtgttacaacaatccctggtgaaatagaattaactcttgctccacgttgaccccattttacagcttctgacatcacacgtttttcattgcagcgtttagctaactgataagcatgtaaagtatcttgaatattatcaacttgtaacaaatcaagtgataataattcttcagttggagtgatggcaagctgttcatcttccaatgctgttaattgtttcatacggtgacctgattgacttgaaatggtaactccaacaccgccttctttaatcacttttccaacttcttctaacaaaacagctgtaccatataaatccacttttaaaatcatttcaattggtgcctgacttggcgaaacaccagcaccattaataagcattgaaatatcaccataacttttagcaatttgaatcatatttaaaatagattctcttgaagataaatccatttcaataggttcaacatcatatcctgcatcattcatgattttagcaatacttttcgcatttttaatcttcttatcacccatgataatcttttttccataacccattcttctggcaatcgccatactgatttgaccagcaccggttactatcatgacatcctttttcattttatagcctccttaatgtccaccaaaaacatcaaattccatagtttctaatttatcatcaatactttgaatttcttcttttgtcaatgttacatttccggcttgaaagttttcttctaaacgtgaaagtttacgacttccaggaataggtatgataaagtcttttttacatatcatccatgctaatgagatttgtgccattgtcgcatttttcttattggctaaatcttttaagatttctaataatgcttgggctttttgaaaaccttcctcttgatattgaggcattttatttctaaaatcaccttctggaaacttcgtttgattgctaaattgacctgttaacaatccatttgccataggtgaaaaagcaacataagtgattcctaactcctcacagacatcaaataagttttcatgccatcttgcaatcattgaatatctattttgaatagcagttacaggacaaatagcatgtgcacgtcttaaataatcttcattcacttcactaattccccacgcttttatctttccttctgtaattaactctttcataactcctgccacaacttctggttcaactttaggatcaatacgatgttgataatacaaatcaatagaatcgacatttaatctttttaaactgccttctaatgattttctaatcgctgctggtgagctatccagttctaaatgatctcccttgtgttcaacaccaaattttgttgcaacaatgacttcatctctgaaatcttgaatcgcaacacccaccaattcttcattataagaaatactaccatcggcattttcaccagtataacactcggctgtatcatagaaatcatatcccaatgcatgtgcttctttcattgtttgaatcgccgtgtctctatcttcagctataccataagcatgagaaaatcccatacatcctaaccctactggattgacatacatatttgtttttcctaatcgtcttttttgcatattatttatcctccttcaatgtttcaacacaatgcaaagcatttaaacttcttggataaccaataaaaggaatgcattgtgatatgactttgattaaaaacgctttactatttcctaatctcacattagctacaacatgtgaagttaattgtggttcacaaccaccttgggctaacaagaaacaaaatgttattaattctctttgtttataatcaagaccttttcttgtataataatcaccaaaacaattatcagttaaccaataattgatatgttttgaatcttcattaccagatttataaaaatcatgcatactttctccaaagatatctacttgagcaagtcgtcctttttctaatcgattttgaattgtcgttgttgattgtccttttaaaggcaaaacaatatcatgagctttacaaaaatcattaacagcgtgtaaaaaaggaagaactctacctattcctaaataagcaactgcttgataaacaatctccttcatttcaataggcgtgacaccaaaatgataggctcctattaacattgctttaaattcatcaattccttgacatcctagcaatgttgcaagaatagctataaatcttgtatgatcatctaaatcatcataattcacaacttcatcaaaggcaaaattatcaaacaattcaataaagtcaggatctgtttttaataattgtgacttgtaattcggaaacattttttcatgatattcttgagctttttgactgattgacatttttattcaccctttaaccattcttctaacttgttatcactatctaaaacttgacttccaacaatcgccaaaccagtatgaacataactatctggacatattttttgaatatctttttcacttcttcccatcccactgccttcatgagtacagaaaggataaatatgtttacatgaaaaattataattttctaagaatgtccatacacacatgggcattgttccccaccaagaaggataccctaaatagatataatcatattgttcaatatgagaaacaatattcttaatttttggtctcacattttcatgtaattctttttttgccaattcagtgcattcatgatattgatcaggataatcatgaagtggtttgatttcaaaaatatctgctcctaacattttttgcatctttaaggcaacaactttcgtattgccaaccttcaaattttgaatttgaccattcacataattttcatgattatgagaaaaataaacaattaaagttttcatttcatcatctcctttttgacacctttattgtaagattttctttttataagaacaatttcaatttcttatcattctcataagtaaaacttatacaaaaaagagtaataaacatatgcttattactcaatcataaattgaaaagtcattatactgattctctttatttgtatttttcaataatacaatgatgatgtttattatctttagtattagtagaataattaatccctacatacaaaatttcttcataatcttttacacgatctacataatttttctttttaatctgattgattgcttcttgtgcagatttatcaaacttcagttctaaaacaattgctggatatccttttttctttggtataaagagataatctacatatccttttccagatttatcttctcttgttatatcataataatttctagcatggagataacataatgttatgacacaagataaactgttttcatcgttgtattgtaagaatggtatttcacgattatctacttcttcaatatactgtgcaaccttttgtgcatctaatgcaatcgttgcatccaatacattttttgaattattaacaatctctgcaacagttcccatactctttctttttagtacattttggaatttctccattaattcataatttggtattcttaagaagccatcatgataagataaaaaaccaaacacaaccattgcagatagaatttcatcacgactgtctaattgtaatgaagatacgctatatccctctaattctacttccactggaatacccgctaccatcttgacgatatcttctcttacggcattggtattatgttcaatatattcagcaatttcattcatcggacccgtttctgtccaataattaagacatattccatccattaaagcaaacgatacagaacgtggattaaaaaggctactgccatctgatttataatatccatcataccatttttttaagacttcaaaagagggttttgaaaaatgctttgataattctttaacttccttttcatcaaagccaaagtaatcttcataagtcctatcatttataaaattatattctctaaacatattcaattcagaaccactggaatactttgcaattggaagtactcctgtcatatatgctaattctacataaggctgatcttttaataatccttttaaaaattctaagtaagcatttttatctttatctttcataaaatttttataaaaaatactatcccattcatccataataaagataaatttatgatttgtttcaaggaatgcatcttgaataggattattctcaatgcttattattccataagcattctctaaatcgctttttaaacgtttttttatccaacttatatattcttcaaaactatgacatggatcaggaagtctgctgaaatcaatataaatcacatgatatttattgatatgttctttaaaagattctacttgagcaattttcaagtctttaaaatattcgtatgcatcatagccttgggtataatatgctcctagcatattggcattcattgtttttccaaatcttcttggacgggtaatacatacatatcggtttcttgtttttattaaaggattcaatttattaatcagcatacttttatccacatatggctcaactgcaatatccattttaaattgttcaaaaggataatttgtatcaagataatacatccgcactcacctcatctcttgttatattatagactttattctcttttgccatcgtattgtttgaaatttcttttcaatataaatataagaaaagaacaatgcttcttcgtcttagagctcacaagatatacattcttattgactaagcctcattaatgcaactttatagaagttgactaaaaattttatctatacagttttaacattcattttcttgctattggataacaatcattttcattatatttcttttaataattgtcttaacaattcagcaaattcttcaatataataacttgtttttgctttctcccaaaaagcacaataatttcgttgcaattgtttatcatgatgatataaaggaatacgagagataccaggagcaggaggtggtaatgttcctacagcttcaatcggtaaaaagccacggttgcttacaaccatcaatcttgcttcttctaaagtttgagcaaataagaattgatttgaaaaacctaatgtattttgataaaaatctttttcagttgattcttgttgtttggtagaaaccaaaatacaagaaattctttttaaatcttcttttgttaatttatctttttgacttaaaggatttaaattcgatatttcaataaaacaatcactatacaataattcataattaaaatagtcattattaaaagcacgtctttgatcactaatcaccaaatcaacatcatgagattttaataattcatataattcctcatgtgttccattggtaatagaaatagcgacttctggataggtcttagaaaattgtgcaatcgcatgatgtaattcttgtgctccataacatcttaaataacctatctttaaagagagttcttgatcttctcctcgcctaattgtttcttttttcaagttttcaatttcttctattaattccttaccatgtcgataaaaatattctcctgctaaagtcaatgtaaattgacgattatttcttttaaaaagttctacaccaagttcattttccaaagctttcatctgttgtgagattgctgattgagatatataacaaagttcagcagcttctgtaaaactatggcaatctacaattgttataaagtatttcatttgcttaaacaacatgcaatcacctctttctttatatattcattatatcataaaaagaacctataaaaaggttctaaaaatctgtttgttcactgatattttgatagtcttgaatttcttttaactttctttctaattcttgagaaacaatcttcacagcatcactacctaataataaggtatgaggtaattcatcttgttcaatcacttttacaatcacttctccagctttatcaggatcacctggttgttgtctggcattcacggtttcttcccttcttttgacacctgctttgacataatcatcaactttaatggctgttccttttaacgcttcatcatagaactttgttctaaaagaacctggttcgacaatcattgctcttatccctaaaggtttcacttctttgatcaaagcatcagttatgagttctaaagctgctttactagaagcataatatccacttcctaaggctgaacgcactgcagcaatcgatgaaacattcacaattgttccactttgttgttgtctcatttgaggtaatacttctttgattaaagtaactggtccaaagacattggtatcatacaattcctcaatatcagcttcttcaccttcttcaactgctgctcgatatccatgtccagcattattgattaagacatcaattggtccaaacttctcatttgtcacttttacaacattttgaatactttgtttatcagtcatttctaaagaaacaggcaaacaagtttttgggtatgcttcatataaatcttttaacttttcagtatttcttgctgtgacgacaacttgataacctttctttaaagctacttttgctattccttttccaattccactagaacatcctgtaattaaccatgttttcattttctctcctccttgacatctttatcttaatacttatagtgaactataagtcaatagaaaaaaagaagaaatttttatttttcttctttatgtctttgttctaattcacgtttgacaagagtatcttcataattatcaattttattttcaagatattggataactgtttgtaattcttcaacttgttgctttaaattggctaattgagtaatcaacaattcttttctttgaggaatggtatgttctccttcatgaaataaatcaacatatgttttaatctgttcaactgtcatcccagaagtccgcatacatttaataaaattgatacgtctaaaatcatgttctgtataataacgatgaccacttgcattcttcttcacgggatccattaatccaattctttcataataacgtaaagtcgttgaactgatatcaaatttttgactcacttcagctatacttaatccttcttccatgatttcatctccttagaatattataatcacaaggaagtcatcaaagtcaacctattttttcattgtatcatgaacaatttttccatcttcaatggtaataattctatcagcaacacttgcaatcagttcatcatgtgtaaccataatgactgtttcatgatactttctctgtgctatttttagtaaatcaacaacttcttgagaactctttgcatccaaatttcccgttggttcatcggcaaaaataattgcaggtttacttgccaaggctctagcgattgctacacgttgttgttgaccaccagaaagttcatgaataaaagctgttttcttttcacgaagtcccaataaatcaatgatttcatcaatatattcattatcaacctctccattatctaaatgaattggtaaaacaatattttcaatgacattttgggtagatatcaaattaaagaattgaaaaacaaagcccattctccttcttcttaatcgtgttagagtatcatcatttaaatcatataaagactgcccttctaaataaactttacccgtatttggtttaactaacccagctaatacatgtaaaagtgtactctttccacttccacttctaccaatcacagcaacaaaagaaccttcttcaatttctattgataaatctgaaatagcatcaactttattatcatcaaaaccatatgtttttcttaaattcttcccttctaatatcataatagccccctattctaccttattcatattttctaaaggttgatttgacaaaactttcaataatggtaatacataaacacctagacatatcaataaaataagtccacttattcctataaaaagttgaataggaaatacccagtattttaaatataaacattcaataatatatataaagattgtgatgatttcaacaatgataaaaataatactacctttacacaattgcttcataaataaatcttttttagtcattcctatcaattgatataaagcataatcatgacgtttattgagaatttcataacgattaaaaacaaaaccaataaaacttgatagaatcaatgtcaccatgacaatataaggatctagataaaccttttcaggataaactgtacctgtagataaaaagcctatcaattccccataatcacgaattgaagaatataatttttctgattgatcatagattttttgaatatacttttctctttgctcaattgtttcataatagatttgaacacattgttgaggttctttaacaactgaatcaaagaaatcagcatccacataaatgcctcctacagaaataagataaaattccattggatgatcatcaacatactcaacttggcttggaagtatttctcctacaatttcaattttttgattttgaatagtcaattgactttctaaagaaagaccataaaaactttcactagacattcgaaattgtccattatgcataatagcttgattgtgatttgtaaacatttttccatcaactgataaatcttgagaatcctttctatcaagccttactaattgcactgttccttgcgttttactatccaactcagggtatgttgggttatcatattgacaagggacctcttgataagaaattatctttgtctttggaaattgtaataaatcaattgattttttctcatcatcatttgtaatatcaactgtaaaatattttccctctttaaaaacaatatccaatttttttccactattgatttcatcaatattttgattatagacttctataacttgattcattaagaaaatagatgcatgaaaagtaagaataatcactaaaaaaatgtgaatctttttattggtttttaattcacgccatgccaaacgccatttgttttgatataatagtttacgataacgaacttgaatatattgaaactgctgaccatcaaaagttccactcaaagcatagtgagatgaacgagatacaggatataacaaagtcatcaataaacaaattaagacaataagactattcactataagtgatgttatatctatagcccaatgaaaaatatgtgtctgttgttctatcactttcataataccataagataatccaacagaagataacattccaagaacaactgcaatcaaagcacatatgacatattcataaagacacatcaacttcaattgacgtgttgtcattccaatgccccttaacaaagcaaattcatgtgaacgtttctttaatgatatagaaataaaagttattaaaagaatcgccatcatgatcaaactttctattaagataataagatctatctgagccacttgataagcattaagttctggattatgattataaccatatggatttaagttttcttcatttcttaatcctaaaatttggcaaccactataattttcaacatccccattcattgataaactgcgatcactataaagcataactttttgataattatcacgactccctgtataaatatcaggaaaataatacgcttgtgaatttcgaatcacacctacaattgtatagtcattattctcattaatacctaaattcaaatggaccttttgattaagcttatattgtttttcttcatataatttttgtgaaacaacaatttcattagtgttttgagcatattgtccactaatcaaatgattagcacaaacattcatgacttgctcattagcatatcccatttgatagccttcttctgattcaccttgcatataaatatatccatattgaaatctttcattatgcttttcataattttgggcaattctatcaaattttagaggatcatcgatttcacctcttacataccaatatccataagtttcctcattgtactcccgattaactctaaaatctgatttttgcacaattgtaaatgtattataaaataaagcaattccaaaaataaataaacaaacaaaaatataatacttcttttgttttatgatattgcgataagcgagttgccataatgttttattcatctgtctccctccttatctttatcataaacttattatcttaaaattaagtgacttatacttttcttttggctaaaaattttggaaatatcaattcaaaaacagccccctgattattatagacattgattattccatgatgtttctcaataatctctttggctaaagacaaacctattccaacaccttctttttgattttgttgacttcgataaaatctttcaaacaaatgatgaagatcatcttcatcaattccttctccatggtcttgaatcaatatttttataagtgaatcattttgatatactttaatatcaagacattgatcatgattattttccaaacaatttttaataatattttctaaggcttctcctagccattttcgatcacaaaataatttttcttgatgatgctgaacgtttatttgcatatgattttcaatcaataaatattctaggttttcttcaacttcatcaataagactttcaatagattcattttgatagttcagaacaatactatttgaatctaataaagccaatgttaataaatcattaactagtttattcattttcattgtttgttgataaatatgttttaatttatctaattgtttttgatcctcaatgacttccaataacaattcttcattaattcgcatagaagtaataggtgtttttaattgatgtgaaatatcttcaatatagtctttgagtttcacttgttcttgaagcattgtttcactcataatatgataacgtttagaaagtgtataaagcttgtgtgataataaactgatttcaccttctccatcaatcaattccatatctttttgttcgataattgcatcagcattatgaatcagttgtttcaattgttgatgtagctttctttgataacaataatatacaattccaagtaaaataaaatcaagaatcataatcaaaagaatgattctttgatttgtttgaaaataaatccctaaaagtaaaaaagtcaaaagatagaaaagccaatataatttttgtgtaaaagaagttgttctttctattgaatccatcgatatcccactcctctcaatgtttcaatatagagttgattttgataagttcccaatttatttcttaatcttttcatatgaacagataaagtattatcttcaacaaaatgctgagtctgttgttgaaccaaatctaaaagatgatttcttgttatgacaacaccatgattttcaacaagacaaagtaagatataatatgttactaaccctaaatctaattcttgattgtttttaaaaactttatattgttttgtatcaatttttaaatcagctgtataaataatatccttattcattggtatacgtcttaataaagaataaatacgtgcataaagttctttaataccaaatggcttacacacataatcatcccctccagcattcaatgcttctacaatactatcttcatcattttgacatgttaaaaataaaagaggcattgaaaattgttcacgaatttgtcgacataaagtgatcccattgccatcaggtaaacgtatatccataatcattaaatcaatagaatcatctaaatattgccatgtctgtttgacacaagtcgcttgtatcacttgatatccttttatttctaatgcttcctttaatgaactttgaatgagttcatcatcttctacaactaatatttttttcatccctcatcaccttatgtatattgtaacatagaaaagtgaaaagaacgtgaaaaaaacatgtaagttgaacctacatgttagcgaatgaaattggtatgtttcttttcatttaccggaacttgtattcctttttcttttccagcctcaatacattttaataaccaagccatatttttacctaagttatacattgtttgcataccttcctcatcttgtaaagcttcttgaggtgtattaccatgaatttcattccaatatgttgaagaaacaattggcatttgattaattgtaaaatatttatttaaaacatcaattgaagcaattgttccagcacgtcttgcactcgcaatagccgcacctggtttatgcgcaaaatactttgatccagaataaaatgcacgatttaaaacatctaaaatccgaccacttggatgtgcataataaacaggtgttccaaagataaaaccatcacaatccttggctttattgactaaaatattaactccatctttaaaaacacattcaccagtttcacggcatttaccacaggcaatacaatcactataagattgatttccaatccaatgaatttcagtctcaataccttcctcttttaaagctcttgatacttcttctaatgctgtataagtacaaccatgttgatgggtacttccattaattaataatactttcatcttttcaccctccacttaatcatattataaactcttttgaaatagaattcaaaacctgatgaatattttcaagtctttagaattttgttatactaaataaaagagggtgtaaagatgtcacaaattacaaagaaagccatggcttcatcattaaagaaattattagaaaccaaaacattatcaaagataactgttggtgatattacggatgattgtgaaattaatcgtcatactttttattatcattttcaagatatttatgatttaattgattggatttataaaaatgaaacagagaagtttttaaaagaaaatgatacttatgagacttggcaacaaggagtaagagccttatttgaatatgcactagcaaataaatcttttattttaaatacttatcattcgattagtaaagaatatttaattgaacatttatatcaagtaacttataacttattaatcaatgtggtagaggaacaagctaaaggaatgcacgtggatgagaagtataagaagtttattgctgatttttataagtatgcttttgtaggaatggctattgattggattgatcaaggaatgaatcatgattatgaaagtcttatctttaatttaagtacattaattgaaggagattttcataaagctcttttacgttttgaaggaaaatactagacaaacttatagaaatgtccaatcttttaccaatatgataggagtggttaaactttaaccactcctattttgttgtccatagaatcacttccttttcacgactataataaagtcagataaacaaggaggaatgtataatgtattatagtaatggaaattatgaagcttttgcaaagccattaaaacctgaaggtgttgatcaaaagtctgcttatttagttggttctggtttagcttcattatcggctgcatgttttttagttcgtgatggacaaatgaaaggtgaacatattcatattttagaagaaatggatttacctggtggagcttgtgatggtatttataatcaagaaaagggatttattattcgtggtggacgtgaaatggaaaatcattttgaatgtctttgggatttattccgttctattccctctattgaaactgaaggagtttctgtcttagatgaatattattggttaaataaaaaagatccgaattattcattaatgcgtgcaactatcaaccgtggtgaagatgcgcatactgatggaaagtttgctttgtctgataaggcagccatgagtattatggaattatttatgacccctaatgaacaattgtatgataaaacaattacagatgttttagatcctgaattttttgaatctaacttctggttatattggcgtacaatgtttgcttttgaaacatggcatagtgctttggaaatgaaattgtatattcaaagatttattcatcatattggtggattacctgattttagtgctttaaaatttacaaaatataatcaatatgaatcattaatcttaccaatgataaaatatttaaaagaacatcatgtaaaatttcattacaatacacaagtcataaatgtagaatttgaattccatggtgaacaaaagattgcaaaacatattatttgtttacacaatggtgaagaagaaattattgatttaacaaccaatgatttactctttattaccaatggtagctgtacagaaaattcttctttaggtgataatacacatgcccctatcatgaataccaaagaaggtgaaggtggttgttggcaattatggaaaaatattgctgctcaacatcctgattttggtcatcctgataagttctgtggggatattgcttccactaattgggaatcagcaacagtgacaactttagatgataagattccaccatatcttgaaaaaatctgtaaacgtgatccattctctggaaaggttgttactggaggaattgtaactgttaaggattctaattggttaatgagttatacatttaatcgtcaacctcattttaaagctcagcctgatcatcaattggttggatggatttatggtttgtatactgatgttcctggtaactttattaaaaagcctatgaaagaatgtacaggtatcgagatttgtgaagaatggctttatcacatgggtgttcctgaagatcaaatcttagatttagctacacattctgcaagcaccattccatgtatgatgccttatattacagctttctttatgcctagaagaaaaggcgatcgtcctttggttgtccctgaaggaagtgtcaactttgcctttattggacagtttgctgaaactgttcgtgataccatctttacaacagaatattcagtgagaactggtatggaagctgtttatacactattagatattgatcgtggtgtgcctgaagtttggggatcttgttatgatgtaagagatttattagatgcaacatctaaaatgatggatggtaaaaagttagacgaaattcatcttcctttcttatatagagtagctggtaaaaaagctttaaaacaatttgaaggaacaattgttgaggaattattagaaagatatcatttaatttaaaatagcactttatgtgctattttttattcacaaaaagagatatcctatgatatctcctgaaaaatacgattaatatcttctacaatctgactatcaattttattttgatgagccatttcacgcatgatttttatactttcttgatgtgacaaagcttttttataaggacgatcttctgttaaagcttgataaatatcacaacaagccaataaacggtcattaaaatccagttcatctccaactttaccaaatggatagccactaccatctaatttctcatgatgaaaacttgcccaatgaacaatatcacctaaatccatatcagttaaaatacgataagtataataagcatgtgtttgcatatacgtatattcacgatcagttaattgagctggcttttctaagatatcgcgatcaataactaattttccaacatcatgtaaaactccagcaataaaaagttgtaagactttatcttgatcattatgataatatattgccatttgagatgctaaagtcgctaccccaatggaatgggatttggtatgaggtgatttactatcaataatatgggcaaataattgacagattgaaagaacttgagaatgaggtatttcacgataagtcagatactcattattttttaattcatagtttaaagcgtaaagatcttgttcaatgacttcaaaggtaatggtagaaatgaaagcttgaatgacttcctgactgaaatgaataccttctaattctttgatatcattgagcattttttgataacctataggatccatttttttaaatgaataatgaatatcaacccaatcagcaagatgaataatttgtgaatagaggggaatatctttttcaactttatgaaaaggaccttttccatcaactctttcatgatgatataaaacaacatcttcaatatgatgataaaaaggtaaatagctcatatttctttctcctgcaatacaatgagcctttaaaaactcatccacatcaagatgttcaccatatttataatattcactcattccattatcatgtaaaatggcacacgctattaaatgattcattgcttcttgattcaattgaaaatactcacccattttcatactaaaatatgcaatcctcttaccatgaaaatgcgaaacataacaacaatcttgctcaacacaatccaaagcataagaaaaagccaataacaaatgattaaaacatattttcacattcatcacctacttttctattattataccttaatcgcttattgacttaaacaaaataaagaaaaagatgagaaaactcatcttattctacaacaatgactgaacctttatatgttttttcaataaattctttgatttcatcagattttaatacttcaattaaagctttaatcttttcatcattttcatgacctttttgtacagcaacaatattgacataaggattatcagcatctactgattcaataataacagcatcttttaatggatttaatttagcttgtaaagcatagtttccattaatcgcaactaaatcaccttcaccattttggaatgttgttgataataattctggtttaatttcagtgaattttaaattctttggattagaagtaatatctttcactgttgcttttaaacgatcaactttatcacttaattgaattaatccagcatcttctaagattcctaagattcttccatgatcagcaacagaattagaaataataacttttgctccattaggaatatcttttttatctttaattgtttttgaataaaaaccaaatggttctaagtggataccagcagcttcaacaatgtcgtatttatgttcttcaatttcaccatcaaagaaaggacgatgttggaaatagttagcatcaacatctccactatttaatgctttattaaaaatataataatcatctaaaactttaatttctaaatcaatcccatatttatcttttaagattggttttgcttcttctaagattttagaatgtggatctaatgttgctgaaacaactaatttcttttgatcagttgcagcttttttattactaccacaaccagcaattcctacaaccaataataatgcgaatgcaatttttaaaaatttcttcattttcatttcccccttaacgtttatctacttttttcacaataaaatctccaatgccttgaatcacaaaaacaataaccaagacaaagaatgtagctgtatacatcacaaccatattttgtctagcaaatccatacatatatgctagatttccaagtcctccagcgccgatacatcccgccattgcggtataaccaactaaagatatacccatcactgtaatacttgaaatcaaagctggcttcgcttcgggaagtaagactttagtaataatttgtaaattgcttgctcccatggctttacttgcttcaattgttcccttatctacttcactcaatgcaatcatacacattcgagcatagaaaggtgcacttgatataattaaagctggtaaagcagctttagctcctaacattgttccaaccaggagtagtgtcactggcaagataataaaaatcagaataataaatggtactgctcttaatagattgacaataaaatctaagatacgatgaatgattttattaggttttaatccatcttccttagtgatataaagaataattcctaataaaaatcccaagataactgcaatcaataaagagataaaagtcataaaaattgtttcttgaatagccaataacattgcatcccaatcaatttgacttaacaactgactcatcttatatcacctccacaatcacttgataatctttaaatttttgaataatttcatcatatgctgctttatctccaccaagaacattcacaatcaatacaccaaacgaactatcaattgtattcgttaaatttcctgaaacaatactaatcgataaatctgtttctttaataacccgagaaacaattggctgtcttgaaatatcttcatcaaaagttaaacgtaataagataccatcaggatatatcaattttaaatcagcatttaatttatcatcatctactttactagaaatatctcttacaaaacgtttagtaatcatatgttgaggatgttcaaagatatctttcacatgtccttcctcaacaactgttccttcactcataaccgcaatacgatgacaaatcttttgaacaacttccatttgatgagttatcattacaatggtaatgtttaattgttgattgattttctttaataaatctaagatttgttctgttgtatcaggatctaaagcactggttgcttcatcacaaagcaggattgttggatcattagctaaagctctagcaattccaacacgttgtttttgtccacctgataattcacttggataagcattttcacgtccttgtaaaccaacaagttcaatcagctgtttcgcttttttgattctttcttctttgttgacaccagctatttctaaagggagttcaatattcttttgaactgttcttgaccacaacaaattaaaatgttgaaagatcattccaatctttgtacgtttttgacgtaaatcctgtgcacttaaacgagaaatatcaacaccatcaataatcacttcaccacttgtttgagtttccaattgattaataattctaacaagggttgatttcccagctccactataaccaatcacaccaaagatttctccatcttgaattgtcaaattcacatcacgacaggcttcaatatcacccttttgggtatgaaagactttattaatatgctttaattcaatcatagcttacctccttatataaataaaaaaactcgtccatctaaggacgagttatatgacccgtgttaccaccttaattcattgttatatcactataacaaccttttcgagtaccatcatactctagtacaataacgggtacaaccgccattagctaaatattcactaatgaaactccagaaccatcttcacctattctcccttgttcttttccaccacccaagaactctctataaagttgaaacagactactctttccttcactgttgttgatattatattaacgtgtctatcagagattgtcaaacattttttaaaattttgtcattatataaaagaatgatcaatttgaataacacaaaaatatgttggacttatttctttaactttcttttcaatagcttgttttaaatccgtatgagcaatttgatcaccagtaggtaataaaacatcaaaaatcaagtttgtatgtgtaggtccactcacaattctaaaatcatgaatactatattgatgattaatgtcatcaacaatttctttgactttttctcttaactgattggttaattcatcattcatatcaataggatccatatgaatagttgttaaaatattaaacttttctaatagctctctttcaatcaaatcgatttgatcatgaatatccataatattatcacaacaattcacttcagcatgaaacgtcatatattttctacccggtccataatcatgcatcataaaatcatgaatcccaataactttatcaaaagacataacatattcataaatctcatcaaccaactctttatcaggtgcttgtcccaacaaaggatcaacagtatctttaaaaatatcaattcctgattttaaaacaaataaagacacaatagccccaatgattccatctaacggtaaatcagtgactaaactaaaacataatgataaaagtgttgcaagggttgtcataacatcatttaaactatcttgagcagctgctttgagtgatgttgattgaatcaattctccagccgtcttattaaatgaggacatccaaaacttaactaagatagaaacaaccaaaacaatcacagcggcaatttgaaaataaactttttgtggttcaataattttcataactgattcttttaaagatgaaaaagcgactaataatattaaaaaagcaatgactaatcctgtaatatattcatatcttccatgaccataaggatgatcagcatcaggatgttttccagccattttaaagccaaataacgtagcaaggttacttcccatgtcagataagttattcaaaccatcggcttgaatagccacggattgtgttaagaaaccaaacaataatttaaaaacaaccataaaaccattacagataatggataaaatactacaaaggattccatatttttctctaacaatgggtaaggatgtttcttgatattgaggtataaattttttgacaatgaattgaaacataaaaaactcctttcaaaaagaatagagagaactctattctaaaaaacattacatattttctttaaataaacatcgcggccatttctttcaagtaaaccttgttcttctaactcttgaatataaccactcattttctcttgatcaacctttttatgagccaaatcttttaagacttctatcatttgcggatgatcatccttgataaaagctttcccatctttatcaaaagatggactcttaagcataacattcaaacaagccacataagcccacttcacttctaaacgaactaatttatattgcattgtatcaaacaatgcactaggcatataatattcaccttcatgattctttaaatcttcaatatcttctttattataacagatcattttatccctcctatgaacgtactttcattatagcatataatatcactaatctctaactctttttgtgaaagtcgaaacatcatcaaaaccaattctttgatattcttttaaaacatcttccacatgttcaccaactcgatcacttgtatgtgaatccgtgccaacagttataattcttccacccatttgataatatctttctacttgttcaaaagtcgggaatccacaagtctttctatctttatacccagaagtattcacttctattccttttcctttttgaatcaatgtttgaaaaatatcatcaataatgctttgatatctttgatgattgacttgtttatcaacataaggtccataacgacaaatataatctaaatgacctaaacaattaaaacaatcaaacttttgaacacactctaaggtattttcaaaaaattcttgatgagcttcttcttttgttttgcctttaaaaaaatctgctggatcataaaattcactttgatgaatgacatgaatagatccaataacataatcataatcatgagcattaacaaaagcattgatttcatcatagaactcaacatccaaccccatctctaaaccaatcttcatcttgatttgatttgcgaattctttttgtaattgtttgagttcatgaaaataacgatcagcatctaaatcaaaaggacaataaggataatgaaaatctttatgatcagtaaaacaaatctcatccaaacctttgtttatggctgctaaaatatgttctctaggtgatgcttcactatctgctgaatagtgagtatgcatatgataatctattttacgcatgatatctacctccaatttcttcttattgtaacattttatttttcatctgaaaagatattatcatattctttgattttttgcataagcctttttataattagcataataattaaaggaggggttttcatgaatgtatatcatcagtttcaagaattagttggtcatacacctatgatgcagctacatcgtattcaagaaaaaaatcaattaaaagcaaatctttttgcaaaattagaatattataatccagctggaagtattaaagatcgtgttgccaaacaaatgctgcttgatgctttggaaactggaaaattaaaaccaggcgcaacaattattgaaccaacgagtggaaatactggcattggactttgtgcaatgggggcttctttaggttttcatgtgatgattgtaatgcccgaaacaatgagtgaagaacgtaagaaattaatgaaggcatttggtgctgagcttgttttaacgcctggaagtcaagggatgagtggagccattgaaaaagctgaaaaattagctcaagagattcctgatagttttattcctggacaatttatcaatccaagtaatcctaaagctcatttattatctactggtccagaaatcgatgaacagatggatggacatatcgatattctggtagccggaattggtactggcggaacaatcagtggcattgggcaatatttaaaagccaaacatccgcagatgaaagtcattgcgattgaaccagcagattctcctcttatttctcaaggaaaagctggtcctcatcaaattcaaggaattggcgctaattttattcccgatatccttgatcaagatatctatgatgaagtcaaagctgtcacaactcatcaggcatatcaaggagcaagagaactagctaaaagtgaaggtatcttagttggtatttcttctggagcagctttatatgttggcaaaacattagccatgatggatgaaaacaaagataaaaatattgttgtgattcttcctgatggtggcgatcgttatttatcaacagatttattttaaggagttcttactccttttttttacaaaaaaaaggaataccatcgtatcccttataaaatatgttcctgaataaatttaccaattccatcatgattattatcatccgtgatataatcagcaacactctttgttttatcactaccatttgccataacaacaccaacaccagcattaagtgtcatatcataatcattatctgcatctccaaatgtacataattgttccattgtcaaaccatgcattttcataacttcttctaaaccatgtgtttttgtcactcttggatccatatattcatataaaacacttgccgtttttaatgaagatgatttgaatttatcatttgagaatgtttgacttctttcaatgactttatccatataatcctcatcacaaacaataattaattttggtttaggttcttttaagaattcatcaaaatcagtaacttgataaggaactttatcagcagttgcaagcatttgaatatgacgatcatcttttggagcaaataaaataccatcataaggaattgcaaagtttaaatccattccttcataatgtttcataatatctttaattaattctccatctaatggataacttgatttttcaacatttaaaacataatcataaatttcagctccacctgttccaacaatcgaatcaactaaaccttcaataccccattcttttaataatgtttgaacactattgacatcacgacccgttgataaaccaaataaaattcctttttctcttgctgctttaatcatttcaattgtaaatggtgaaacaacttgttcacttgttagtaatgtcccatccacatcacacataattgctttaatatccattttctttccctcctatgttcctatcatataacaaaagaatatactcactcaattcaatcattataaattgaaaaaatattacgttttttttatttataaatcagtaaaaaaataattttttatcatttttcactattttctctgatgacttgatagtattctaatttcttttgtaagaaataatcataatctaattcaaaataacaagtatataaaacatctaatatataaagtaaagaaagtcttgttgaataagatgatattttatgataatgatcttcatgtgaactcataaataattgataatcaatatgagtattaataggatgatattcagttgaagatattaataaaattggtgttttattttgatttaatatagcaggtaaaataggtgataagatacctctcccgccaaaggaaataataatagcaaaatgagtcttatcacttgatgaagcacttaaacgttgacgatactcatcaattggcacattgacaataaccccgatttcttgcatttgaaattgaaagtttaaggcaaaaggaacattccctgcagatgtataaatatctataaatttagcttttttcatagcatttacagcatgttttaattgatctaattgaaatagttcaaatgttgaatcaattgtttgtttataatcagcttttaaattattcatcatttcaaaatgagtttgattttgttgaattggaaaattaaaatcaatattttcattttcttttaaataactttctattgaaccagatatcttgacttttaattcagataaacctgataaatttaatttctcacataatctatagatactagatgttgaaacataacattcttgactaatttgttttgtattcatctctaagaactgttgaggatgttttaaaataaattctacgatagctttttcactattggttaaatcttttgtcacttttaataatgcaaatatattcatgattttcacctcttagctttattttaacattaaaaccaaaagaaaaaaatgctataaaagcatttatttcataaaaggtgcatattctaaacgaataaaatatccttgatcatgttgacaaactggacatttttccggaacttgagttccttcaaaaataaacccacaatttaaacatgtccattgaaccgatgaggaagaatgataaagttcattgttttccatccaagttgctagttgtccaaaacgatcaccatgtgttttttcaatttccgcaatgttttgaaaatcttgagcaacttttaagaacccttcctgcgaagcgacttcagcaaatttttgataaacatcttcatattcttcatattcattatgctttgcataatctaataaagttttcacatctttagaaatatcaataggatatccaccatcaataaagattgtttcaccagccatagcctctaaatgattataaaagatttcagcatgttctttttcttgactagcagtaaataaaaacacatcacctatcatatgatgtccttgtttaatggcttcaccagcagcaaatgtataacgatttctcgcttgggattcacctgcaaaagcacgcattaaattttcttttgtttgactttcttcaaatttcatctgataaatcctcctttaacatttgtagtataaacaataaaaaaagaattattcgttcgattgaacaaaataattcgcttttataataaaccttatgaaattgaatcataatattgtttttccttatgattaatcaaaaaaacaataataataatacatataacaggttccccaatcattaatgtcatagcattgaagaaattacaacaaatagcactcttacaaatcatttctataagtggaaaaattgttccataatgaataaatactgatatgattaataatcccatcaataacagcgtatattttataactatatttttcattaatattcgcctctttgatgaaaatcttttttattaccagcgatttgatgacgttcagataatttcttttcaatatcctcaacttgaataccttgttgaaacatcaatacaaacgtatggtaaaacaaatcactaatttctccgattaattcttctttatcattatttttagcagcaataatggtttcacttgcttcctcaccaacttttttacaaatcttatcaattccttgatctaataaataattggtatatgatttttcaataggatgaacatgacgatcagcaatcacatcatataaatcatgaaaaatattttgtgaaaaatgataaggcaacacttcattaaagaaacaagaataacatcctgtatgacaagcagctccaatttgttcaacataaatcaataatgtatcctcatcacaatctaaatacatacctttaatatattgaaaatgtcctgatgtttctcctttatgccataattcaccacgtgagcgtgaataataataagtctcttttgttttaagcattctttcataagcttcttcattaacataagctaacattaatacttgttttgtttgatagtcctgaacaatcgcaggaactaatccatttcctttttcaaaatccggtctcatatatttctccttactggtatattatgttttacacattcttctttgacttgatcaattgttgcttcaccataatggaacaatgaagccgctaaagccccatcacaattggtcttttcaaaaacttcaacaatatcttctttgtcgccacatcccccacttgcgataacagggatagacacagcatcaatcacagcttttaacatttcaatatcaaagccatcacgtgttccatcacgatccattgaagtcaataaaatttcaccggctcctaaagcttcacattgtttaacccattcaataagatctaaaccagtgttctctctcccaccagcaatatacacatcatagccactcttatcagctctttttttagcgtccacagcgacaaccacacattgaactccaaattcatcagaagcttctttaatcaattgaggattcttaatcgctgctgaattgacagaaactttatcagcaccacttgataaaatcatacgaaaatcatcaattgtacgaatacctcccccaactgtcaaaggaatagataattcacttgcccctctttgaatcaaatccttaataatatcacgcttttcataagttgcagtaatatccaaaaaaaccacttcatcagcacattgttgatcataacgtttggcaatttcaattggatcaccaacatcttgtaaaccaacaaagttcacacccttaacaactttaccatctttaatatctaaacatgggatgattctttttgcaagcatgatatcacctctttcaaatcaatttttccttcataataagccttaccaacaatacatccataataacctaatgcattcacacgatagatatcatcagcatctttaattccaccagaaacaacaaacttgattgaactatgttcaaaaatatcttgatacaaatcataggatggtccactcaatgttccatctttagatatatctgtacaaacaatatattgaactccgatattttcaagttcctttaaaaaatctaaataatgtgtcttggtttgaacaagccatcctgaagttgcaacataaccatctttaacatcaacacctacaacaattcgttctggtccatatttttgaatagcattttttaaaaattcgggattttcaatggctgcggttcctaaaatcacacgatcaattccaatttgatctaaataaagatcaacggtttgcatatcacggattcccccaccaagttccataggtatggataaaacatttctgattttttgaatcgtttcaagattagttgttgtaccttcttttgcgccatctaaatcaacaacatggagataatcagcacccattttttcaaagttcaaagcaatatcttcaggtgaagaagaataaattgtcttttgtaaataatctcctttatataaacggaccgcttgtccatcttttaaatctatagctggtattaaaatcattgaatcatctccttaaaggcaagtagaatttgttttccaacttcaccacttttttcaggatggaactgacatcccatcacattatctttagctacaatagcagtgatttttgaatcaccatactcacaataagctataagttctttctcacaaggataagccatatatgaatgaacaaaataaacataatctttttcttttatatttttaagtaaaggatgttttttagcaaaacacagttcattccatcccatatgaggaattttcgcattgacctgcatcaatttcacttcaccctttaaaaaacctaatcccttcgtcaatttcacttcttgaccttgttcaaaaagaagctgcattcctaaacaaatccctaaaataggaacaccagctgcttttctttcttttaaaatatcaatcaaatcatactttttaagattttccatagcaactgggaaagttccaactcctggtaatacaatcccatcggcttgagagatgacatcatgatcacgacttactatagtctttaccccaatacgctcaaaagcattttgaacacttttcagatttcctatattataatcaataataacaaccatactcatccctcctttataaaagacctttggatgaaacaatcagatctttatttttttcatcaatcatgactgcttgttttaatgctctagcaaagcttttaaacattgcttcaataatatgatgagtattttccccataggattcattgatatgaagtgtcattaaagcatgatcactcaccgctttaaaaaattccttagtcatttctgtctcataattaccaagcgtcatcataggaagtgttgcatgataaacaagataaggtcgaccacttaaatcaagagttgtagtgactaaagcttcatccattggaatagtcatttgtccatagcgcataattccttttttatcacctaaagcttgtaatagacaatctccaaaaacaattcctaaatcttcaatagtatgatgactatcaacttttaaatcaccaacacatttcacttttatatcaaatccactatgaaaagctagtaattcaaacatgtggtccataaaaccaacccctgtatcaatctcagcttgaccacgaccatcaagatttaactccataacaatctttgtttctttggtttctcgattgattgaacttgtacgcatcttactcctcctcaaatctgactgctacactattggcatgtgcatcaagaccttctaattttgcaaacttcacaacatcatctttaaatgttgataaaacttgttttggataataactatatgatgaatatttaacaaaatcataaacccctaaagcactatagaatttagctgtccctccagttggtaaaacatggttagttcctgacatataatcacctaatggttctggagtatattcacctaaaaagatagagccagcattatgaataagcggtaaagtattaagtggattttcaaccaagacttctaaatgttctggtgctagataattagaaacttcaaaagcttcttcaatactgtctaccaaaatcgctcccccgtaattggcaagggattcttcaattatttctgttcttgataaataagccatttgtctttgtaactcttgattcacttcatccaccaatgcaggacatgttgtaactaaaatggcactagctaacttatcatgttcagcttgactcattaaatcagcagcaatatattttggattagccttttcatcagcaacaatcaaaatttcactaggacctgccaccatatcaatatctaccatgccataacaattcttttttgctgtcgcaacataaatatttcctggtcctacaattttatcaacttttggaatcgtatttgttccaactgccacagcagcaaccccttgtgctccaccaactttataaattgtttcaataccacaaacataagccgccgctaaaattgttggattaacttttccatcttctttgactggtgtgataatcaccaaatttttaacccctgcaagtttagcaggaatggcattcatcatgactgtagaaggataagttgccgttcctcctggtacatataaagcaacattttctaaacctctaacaatttgtcccatcataactccgttttctttataaactgaccatgatttatcaacctgatgtttatgaaaatcagtaatttgttgttttgtacgctctaagatacgcataaaatctttaccaacttcagatactccttctaaaatttctttctttgtcacaatcaattcctttggatcttcaatcatgaacccatcaaatttacgacaatatttcatcaaagctttatccccattttttttcacatcatcaataatactatcaacagcttcactgacttgttttgaaatatcagctttacgtgatgaaaactttgcagcaatatcttcataatttcctttaaaatctaatgtctttaacatcttttattcctccccatttaatcgatctatcattttaaaaatttcatcttttttaaattttaaactcactttattcacaatcattttggttgaaatatcactaatcttttcaatgacttccaacccattggctttcagtgttgaacctgtttcaacaatatcaacaatcgcatcactcaatccaaccactggtcctaattccactgaaccttcaagtttaataatttccacatcttcttgtttagaattaaaatattcttttgcaacttttgtatattttgaagcaatgcgtttacgacgatggaactctttggttttatattctggataagctgccacagcaaaataacactttccaatatttaaatccagcatatcataataatcatgaaaatcactttcatctaaagtatcctgtccaacaaaaccaatatctacaatcccatgttctaagaaagtcaaaacatcattggctttgccaaaaatcattgataaaccatcatttgtttcaatcaataattcacgatctttatgaataatggggtccatatcataaccacgactttgtaaaagctgacaaacttgtttttcaatacgtcctttagtaattgcaattttaatcatgactttcaccttccttttctaaagcatttaaaatatgacttaaatcataactaaatccaatggctggaacatccttatgaaaatgattcattaaacgatcatatcttcccccattgataattgtttcagcactataaggtgaatatcctttaatcataattccagtataatatttcatacttggtgtcattgctaaatcaaaactaaagacatctttgttattgagatgattatatagattttctaattctttaagtgcagctttgagttcttcatcttgaataatagcaatcatcttttttaggatatcaatatctccaaaacatcttggtaattgaatcaataaatctttcagtggactttgaatctgttttttctcaatcaattttttgattgctgaaagatcacgcttttttaagatatcaacaaatgattcatcatcaaccaattttaaaagccgatgataaaacttggctgaactcatttcaatcttgatatcttttaactgtaaagaagataaagtctcttgaatcacttgtaaacactcgatatcgccttcataaccagctttccctaataactcaacaccagcctgaaaaaattcactacttcttcctttatgacgtttttctttacgataaacttttccaaaataacaatatcttttttcaccttgttcttttttactactatataaacgagcaagtggaacagtaaagtctgtacgtaaagccactctcttgccttcataattaatatattggaacatcttttcttcttcaatgcctatatccatatcattgtataaatcaacatattcaaatgatggcatcaaaacctctaaatatccatttttaacaaaaacttgtctcaaatcattttcaatagttcttaaagttgcgacattatccataatcgcatcaatactttcttctggtatcaaatatttaaattcttccatatttcccctcctataaaaaaagacgagtcccaatgactcgtcaatatctttaagtcattagatacacccatttatgtatatgcaaaatgggctgtatcaatcactcgatataaccctacttgtaccaatgatggtgatgtaattttgattttaaaattgtatttttcataaataccacctcattttttaccattttaacatatttttaaatataataaaagaactttttaaaaaagttcttattattcttcacgatgaaaacaaaccagtgatttttcatcaactccaatatcatcagcaatcacatgacactttaccatcaataagaaataaatattttttacttcctcacttaaactctcataattagcttgtcctttagcaataatcacatccgcttgatgataaatatctaaaaacttgggactcacacgatgtaaaatagtccccaaagaataatctccattatcaataatcgttgcataacgatccatatgtacataataagcatcttctaatatcgaatcattaacaacagcttctcccctagtcgcaaaatatatcattaaatcaggatacatctgttttattttttcaatcaataaataatccaaacaaatttctccacaattatctcctaaatataataatgttttggcattctttaaatcattttttaatttttcaatatcatttaaagtcagtctttggtttttaatatttttaaaatatttcataacatcattgatatcatgattatgcataggactaaagtcaatgatatttccaataattgcataacgaatagccatttcaaaagaatcatctgctttttctattaagtcacggaaataatcttgttgttgtaaaaacaaatcattataataacgtctgatttctttataaggatcatcattatgaatatgtttctttagcatctgaaatgtttgtccaataatttctggattggttaattcaaaatctaaagaacttaaataatcaaaaacttgatgataaagttcttctttattttgtgcatgactcatatgagcaactttcacaacttgattaaccaaacaaggcaaacagtaatctcttattttcatatactcattcctctctttcattaactattctagcattatattttattaaaatattaacatttccatattatggaagtctatgtttttgtaattccaataaaacaacatcattaaaacattgcaaagaataatgataaagttgattcttgataggaatatgaataatcctatcaagatatgaaaaaggagaaagtttcttattatttgtaactacataaattttagctcgactcttttttaaagcagttaaagtttgataataacgagaataacaattatcagtcacatattctcctgatattgaataaataacaataagagtctgatcatcagcattctcaataaaagaaagttgatcaataaaatgtgagaatgaatatgtcataattcccttcattgctaaatcatagtgtaaatttttaaccatattttcactatttaaaataccaaacattccaatcttaggaaatgaaagtaaatcatgaataaattcatctaacatatcaaaagaaaaatgttcaaaaaagtattgtatttcttcctgaacatatttttgataagttgaaacttccatttgattgtctttttgtaacaatgaatgtctttgactatgtccatgaacatttaatgattccttgaaatcagaaaacgactgaaaaccaatatgcttaataaatcgacttacctgtgaaatagagacacttgctgatttagctaattgattaattgaataaagactgacttgatttatatttttcactatatattcaccaatacatcgatcaactaccgaaatatgaggatcattaatataatcaagtaatgtcatcaatactaaattcatgtcatctatgccttattaaatgaattataatattttaaaaattcatcactatcaaaaacataaacatgactatcatgggtatgatgaataacaagatgatgttttgatttcttttcaattgattgaatatctttgtattcaattattgttggaagcatagcagcaactttccattcataaatcatcattacatcatcaaataaaaccatcttatatcttcctaataataaaaacaaagcaattagcgctaacataaaagcaccaatcatttgtggtttatgtccattcattgctgaatagactccaattccaataaatgctataaacatcatcaaacatacaataaacatacgatattctttaaatctttttttcatttctatcaccttttttaagtttaccatattcaataatgtttgacaaagtattttaaggttacaaatttattaagtgataattttttattaaattataaaaaaatattcacatttcaataaaaacgtgtataatagaataaaaaaaggaggatattgatatgaattatgtggaaaaagtactatcagaagtaaaaacaaaaaatgctgatcagcctgaatttattcaagctgttgaagaagttttagaaagcttagaacctgttattgctgctcatcctgaatatgaagatatggcaatattagaaagattagtagaacctgaaagaacaattatgtttaaagtaccttggcaagatgatcaaggcaaggttcatgtaaatagaggttatcgtgtacaattctcaagtgctattgggccttataaaggtggtttaagattacacccttcagtaaatttaggaattattaaattcttaggatttgaacaaatctttaaaaactcattaacaactttacctattggtggaggtaaaggtggttctgattttgatccacaaggaaaatcagataatgaaattatgcgtttttgtcaatcatttatgactgaattatatcgtcatattggaccagatgtagatgtacctgctggggatattggtacaggagctagagaaattggttatatgtatggtcaatataaacgtattagaggggcttatgaaaatggtgttttaactggtaagcctttaccttatggtggttctttaattagacctgaagcaactggttttggagctgtatattatggtaaagaagttttaaaacattttaatgatagttatgaaggaaagactattgcatgttctggttatggaaatgttgcatggggtgtttgtttaaaagctagagaatatggagcaaaggttgtttctatttctggtagagatggatatatttatgatcctgaaggaattattactgatgaaaagattgatttcttagtaaaaattagaagttctaatgatgttaaattaaaagattatgctgaaaaatttggttgtgaattccatccaggtgaaaaaccttggggattaaaagttgatatggctttcccatgtgcaacacaaaatgaaattggtttagaagaagctaaacaattagttgccaatggtgtaaaatatattattgaaggtgctaacatgccaacaaaacctgaagcaattgcctatttcttagaaaatggtggaacattaggacctgctaaagctgctaatgctggtggggttgcagtatctgctttagaaatggcacaaaactcaatgcgttatagctggacaaaagaagaagttgatgaaaaattacatcaaattatgattagtattcatgaagcttctgttgctgcagctgaaaaatatggtttaggttatgacttaatcaaaggtgcaaatattgctggatttgaaaaagtcgtagctgcaatgatttctcaaggaatttattagaaacaaaaaaaggcttgtcatatgataagtctttttctatgcgcataaatgagacagcactattacaatattggtatagacaaacaatttctcagtgagaatcttcaaaaaaactaagtcaatactttgagttaagttatgatgagcttctagaaaagaaatgataaaaaaatattttttttaaatagtagtgaagattttttaagttctgctttgattattactcctattatctttttatatgaccaaatatcccacaactcccataagcgttcctaaaacaattgacataatagtcattggtattattgacttcttatcatccttagcagctagaataatgacaggaatagttaataataaatttaacaatccacctttgagccaccaaggtaatccccattctatagaaaagattataaatggagcaatcaaataatgaacaaatgcagaaaaatttgagtatttatccattttcattttaatcataggtaaaacatcaataagacctcccaataaaccaataagcagtgtaaacaaaaatgttgtcatttatttttcctccttatattttctttgaaattttaaacaatcaatctcatactgataagaaataagcttttcttttaaaatagtaagcagtggcgactgatcatgtatacaacataatctatttttaatctttattaatttatcatttgaaaccttttctaagttaatatcaccaaaagcaatatgaatatgtccacaacttccacattgacactgataattgaagataaaattatcatacgttgtatagcataaatatccaatattttcaccacaagattcacaataaatccaaccaccatactgatttgccaatcttgtatgagacaactcttttatctttgtatttctactcattttctccctcctttattttaaataatcgataacaaaataactgcaatttgaatacaactcaaaaataataagaataaatataagaagatttttttattctttttataacgtattatcaataaacactcaatagatggtaaaatccaaatagctaaatactttgataaagtagaagttacttcaccattcatacgaaattgtataggtatctgcgcaggtaataatggcaaacataaaacagataaaaatattaaaataactggaaatataaaaacaatgtattcttttaaattcttcataaatttcctcccttcataaattagacgatgattaattgattttgtgacaaaataatataaataaaaaaaagacataaccgaagttatgccttaactcattattcttctgcaggtaattcttttaattcttcttcacctgttacatattttaaaatagcaatagctgcttcttttggtcctttatgttcattacctttaataccaagtcttgtacgtaattgaccaactttaacaccttgtttaaacattcttttgaaataatcttgtaagataggttctgtttgttcttttctttgaacaggaccaaatggattagcaaaataactttcaacaatacccatttcagttgttgttcctttagccatacgtgcccctgatctaaaaacttgaagtgcttcttcaggactatcaaagaaacttaatgcttcaccatcttcttcatagttatttgcatataagaacatatcaacatcatgtttagcaacaacatctttgtaatcagtaattggaataacaatacgtgcattgactttatctggattcataaagactgatctatctaattctttaaaactataaccagcatctaagtcatctaaacgcacaaatgccccaatttctgtaccagaagtcttaaccttacctttttcatttaatgataaaacacccatatcatcataaatagttgttaaatcagtgatatatgcagctccaatgactttaatttgttcaattgtttcactcttaccagcaccactatctcccataacaacaatattctttgtttcaccattatgaagtgtcatcttaaccattgctccatgaattggtaattcacgatgattaatcttttgaacattgtgtaaagttaaaatcattttcttcatatatccaaaataatcaaaattatcattagcagataataaagccacaatcatatcattagattcatcttgatagaatgcttgattcatttcaccatcttcataaccaaagacataaattaaatcaggttttctatttctatattctgtttcatcagccaaatcaaataagttacataaagtaaccccttgtgccataaacttcacattaaagtaaacaaaacataataaatcaccaactttagctggataacagaaccaagaatcagaatcaaatttacgatcttcaattggatttcttttcatttcagggaaaacaccatctcttttattacgttttgaataagcaataaatggtggatgaataactactgattcaataaaaggaatttcatccaaattacgatattcatatggcaagaatggtctcatatgagtcactgttaacccagcattaacccctgctgtaatttgacgtaagactttatccttcttacctaatgcagattcaattgaacgatagacttctaataccaattcttcaaattcactttgtgcatcagcaaattgaacattttgatatcctgctctctttgtttcattgaatacaacagcatatctttgtagacgtctccagaataagtaaatatcttctactaatgcaataaacatatcaatatctttaaaatatttcttagcttctggacgaattgaacacacttcatcaaccgacataactaataataatttaaaaatacctcttaaattatctaataaatcaacatcatcttcttgaataccatgaagatatccatagatagttgtatcttttcttttaatattttttatatatttctctaaaactttcgcaaaagattcactttcaattaattgacaacgactttgacagaattcttcagagaaatttaaaatcgcattacctcttgttatattaaacttatatgccataattccaccctttctttagatatactttgtatatccccttaatttaccatacattctatcaaaaaaagttgaccttgactactaaaattgcaaaatttattgaatgatagcgtttttatttttaaattttatctttttatcattttttaatactgttttttctataaaagacacattaatataataatttttatgagaaatataaatatattcattttcatcttttaattcaatacattcattattgtatacaatcttattttgaccataatcaaaaagataatttccttcactcatctgataagtcaaagtatgtttttgttcatccacataaacctttgtattcttatctaaaatcaataccatattatacatatcattcaatgataaatacatcttctcatctttttgaaaaccttttaaatcaaaagtataaagcttattatcttgacgataagttgcaacatacgtatcaatcttaccctcatattcataaaaatgatttctatgaaaaaacatatacaacaaaatcataactatcaaacaaaacccgacacttacaatcactactcttttatatcttaatcttttcattatatcctccaaaagaaaaaaggtcttatcaaaagaccttaaaaaacacacgaccaacaacctgatcatcaaaatcaatatatccaatcattcttgaatcaacactattgttacggttatctcccataacaaaaacctttccctttggtatatcatatgaaaaatctccatttcctaccatcggttcattaatataatcttcgttcaataattcaccattacgataaagcttgttgtttttcatctcaatatgatcacctggtaatccgacaactcttttaataatttgatcctcacctgcactgacatgatatttcacaacaacaatatcattataagaaggtgttcctcgcttataaaagtatttatctaccagaataatatttccattatgataagttggttccattgatgaaccaacaactctagagatttgtataaaatgcaatacccctaatgttaaaacaactgttataataatgactttcatatattcaaacaaggatttcttgatatcttctttttccattttcatcgccccacgctattatagcatattattcacaatcttttaagcgtgttcttaactttgttacaatttttttctctagacgtgatacttgtacttgtgatatgcccagtctttttgcaatagcttcttgattataatcgagctgataacgcatataaataatcatcttctctttttcatcaagtttttccatttccatttccaaggcaattttttcaaaccacatatgatcacttttatcaattaaacgatcttcaacactgattgttgagccatctttttcatatattggttcatttaacgatgttggataataagaagaatcaatggcttctacgacatcttgaacatcaacatctaaatattttgcaacatcttcaactgttggttcttcattattttctccttgtaagatttctttagcttttgtgactttgatgttcaattcttttaaagaacgagaaactttaattgttccatcatctctaaaatagcgcttaatttctcccataataataggaacagcatatgttgaaaattgaacattgtatgaaggatcaaaatgattaatcgccttcattaagccaatacagccaatttgaaataagtcctctttatcataataactattcttgaatctatgaacaatcgaccataccaatcctaaattatctttgacaacttgttctttcgcttgttcatcccccaaacgcactttcacaagtagatctaatgttttagaactagccatgatctttcagtctttttgtgatgattagttttgttccgatattgataacactttcgatttctaagctatcagccagtgtttctatgattgttattcccatcccagcatgttctaagtcttttgcagtcgtataaaaaggtgttttgacttgttctagattttctattcctttcccataatcttgaataactaatctaacaaggcgatcttctatttccatctttattacaacatgacattcaggattattattataaccatgaataatcgcattactaacggcttctgaaacaattgttttcatctcaatgatttcatcaattgttggatttaaaggagtcaaaaaagcccctactgttgttctagcaaagttttcattatctaacgttgcactaaaactgacttccatttgattcatattgatccctcctttaaataatctaatgattcataataaggcataatttgaaataaacccgttaattcaaataaacgatatgccacttgatttaaaccggttaatatcagtgtacgatgctcaaatttcaattggttataacgtcctaaaaccaacccaattcctgaactatctataaaggatgtttcttgaaaatcaaagacaacatcttcatctgtttcctctaataaatcacttaattgttgacgatagattggtgccataacacaatcaatctcaccataaaagtgaacaatgataaactgctttaatttctgtatttcaatatgattttccattgtatctcctccttccctgctatcatataccaattaaaaaagaaagaaaatcgattcgctaaaactagaatttattcaacaaaactagaacatttttgcatttctcttgctttttacttataatgaaaaaaaggaggcaacatatgatatatagaaaagcaactaagcaggatatcccacaattatgtcaaatcagaaaacaacaattaatagatgaaggtatccctccctctattgatattgataaagatttattacgtttttttcaagattcctttcagcataatactattatcgaatttttagccattgataatgatcaaattattgctactggagcagtctgcttttatgattatccacctactttcagcaatcaaactggacgtattgcctatattacaaacatgtatacacagccagcttatcgtcgtcaatcaatcgctactcatatgcttgatttattaatcaatgaaattaaaaagaaacatattgaaattgttagattaggcgcttctcaattaggaaagccagtctatgaaaagtatggatttaaacaagataatcaatggtattctttaaagttggacaattaaaagacatttttgtctttttttatttattttatgttaagccatgtaatatttctatgaacccctctaaagattctgtaaactcccccaaatcataaaaaaatactgctataatttgctcgtcttaatgacaaaggaggaaattatgaagaagaaaaatctattcgtatcagccttagtggcaactttactcacgcagcccatatcagtatttgctagtgctgcaatggatgggaaaactgatgcttccactaccccagctgcattaaatggagcatgggaaaaatggactcaacaatggaacaaaattgaaaatgattggacttatgtttcactatcaccaggaaaagatgaaacagagatgaattttgcttggtatagtcatgaatcacaatcagctacttttaaatatggattaaaagctgatttaagtgatagtcaaaatgcgacaatttcatcaactccagcccaagttggttatcaaagcaataaagtaacattaacgaatcttaaagctggaaaaacttattattatcaagtaaacgataaggaaattgctcactttacaacagatgatgatttcagtgattttagttttatctttgttggtgacccacaaattggttcttccaatgaagaaaaagccaaaaaaccagaagatattatcaaaccatcttttttaactgctcaaagtgaagcagtaagaaatgattcatttaattggaataacacattaaataaagcttttacaaagagtcataaacaagcaagctttgttttatccgctggtgatcaaattcaaacaaatgctaaaaaagtaaaaaatcaaacaatcagtgaaaaagaatatactggttatttatgtccagaaattcttcaatcattacccgttgcaacaacggttggaaatcatgatgctgataatcctaactacacatatcacttcaatcctagtcaaatgagtgaattaggaagtaatgatattgttggtggtgattattattacacttatggtgacgctttgtttattatgttaaatacacaagatacaaatatcaatgaacacaaacaattcattgaacaaacagtaaaaaataattctgattgtaaatggcgtattgttactttacatcaagatatctatggttctgcagaacattctaatgaaccagaaatcactaatttacgttatcaattaacacctatcttagaagaaaatgatattgatgttgttttaacaggtcatgatcatgcttattctcgctctcaaatgttaaaaggtggtcaaaaaacaaatcattatactgatgatgaatttgataaacaattagaaaaagatatagatgtcaaagacagtactcaatcactcacagtagcaccaggaaatattaaagatgatacaaccaatcctgatgaacaagcatatttagcatatttaaaatccataatggatgacgaagcagttgaagcaatgagtagtggaaagaatatggcggtagattcaaaaggtatcttatatttaactgctggttcttcttctggaagtaagtattatgatttggtgccaagacaacaaacctatattgctaatagatggcaagaagatgtaccaacttatacacttattgatgtcactgaaacaactttgacttttaatacatatcgtagtgataatgatgaaaaaattgattcagaattcacgattgttaaatcagtgagtcatcaagaattaagtgacctcattaataaagcaaaaacataccaacaaaaagactatacaaaagaaagtttcacacgctttaaccaagcattacagggagctattgaagttaatgaaaacaaagcatcaacttctcaagaattggccaatgcctataaagccttaaacgacgctatcaaatcattagtcaaaaaaacaattcaacctgaaaataacacaactccaaacactccgattcatcaaacaggacaaaatcaaaaaaacgaactaactcaaagtgttcaaacagatgatcaaacatctattcttttcccaataacattaatcatcctttcaggattcggacttatgatatttaaaagaaagaaattattaaataaataggagcatgctcctatttatttgaaagaaaaatgaaatacaaaataaataaaagacaaatcattgtttttataatcataatcatttttactatatttttatatcaatttaatcaaattgataaagttcagctttatcatcaaaatggtaaatcttttgaatcaggtgaagttgtagatattattcaagataatataactgataatggtaaccagattggaaaacagattgttactattaaattattatctggtccttacaaaggaaagattgttgaagctaatagttcctcaagttatttatatggaactcattgtcaaataggaatgcgtgtgattgttgatatcagtgaaagtcaaaattctctttatgttaatgtttatagttttgatcgtagtcatattatatatgcaattgttgtcttttttcttattagcctgtggattgttggtggtaagcagggattcaattctgcaattgctttgatttttacttttatttgtattatctttttattcttacctatgatttataaaggagtttctcctattttatcggctataatcatatctatattaatcacaatagtcactatgtacctcattggtggatggtcaagcaaaactatgacagctattattggaactatttcaggagtcattatttcagggatttttgcttttgtatttagctggttaacacatatatcaggttataatgtttcagatattgaacaattagtttatcttgaacaaatgacttctattcatattggtgaattaatgtatgctggtatacttatttctactttaggtgcgattatggatgttgctatgtcaatttcatcaaccttaaatgaaatctattatcataatccttatttatcagttaaagaattgtttcattcaggacaaaatgttggtaaagatatgatgggaacaatgtcaaatacactaatcctcgcttttactggtagttctataaatacacttattttcatatatgcttatgattatccattgttacaaattatgaatatgtattcaattggtattgagattattcaaggcattgctgcaacccttggagttattttaacagttccacttgtctctttaataagtgcctatcatcttaaacacaaagcaataaaccctatagatacattttgatatctatagggtcttattttaaataaagagttgtaaatattgatacattttttctggtaatgttaaggctgcaatatctttatgggcaacaacatcaaaagaagcaatattggtatcatttcgcattaataaaacatgtccaattgtttcacctttttttaatggtggaacaatattggtataattcatttcataagtgaccttatctttagaactcttatctttgacataaataacatcttctttacacactgcctcaacatatttttctctggcattttcaatttttaccttttcaacaatatctccttttttaaataatgtaatgttttcatagagtgaaaatccataatctaataattgtgaaacttcttgatttctcactttaggatcactttctttcatcacaactgcaattaatcttaaaccatttctttttgctgttgaaacaatacaatatcctgcttctttggtataaccagtttttaaaccatcagctccttcatatgattttaagagtttatttgtattcaccagccaaaactttttttctgtattttcacggatgtaactatcatacaatgatgtcgtttgaaacaaacgttctcctcctatttcaatcagataactcgccatcattgctaaatcaaaagcacaagtataatgattatcatcatgtagaccagttggattcataaaatgtgtattctttaattttaactctttagctttttcattcatcatttttacaaaaccttcattacttccagcaattctttctcctaccataacacaagcatcatttccagaagctatactgattgccttaaaaagatcggatacactcatcctttctccttcttcaagataaacttgacttcctcccatacttgcagcataggcactgcatgttaaaacatcatcccatttcaatgttcctttattaattgcctcaaacaataaaatcattgtcattatttttgttgtagatgcaggaaagagtttttcagtttcttgtgttgcatttaagacttgttttgttgaagcttctattaaaattgaagatgatgcatttggtgctaatttcaattcttcagcatggactgattttaaaggtatgcataagaacataacacataaacatatgaataatttttttatcatggaaacacctcaaattattatatgtttttgcttttaaattattataaaaagatatgaatttattcataatgaatacacatatctttttatcttaaaattttaatttatatttatctttgttatataacattgttttttaaaaaatgatattccatagcccacaacatcttgatatcctttttccaaaactccttctaaataatgattatcatgtatttgctttattgcttcttggctatcttttaataaataatcagcattctttgaatgtttacactctataactatagctttatcttgaaatatttcaggatagatgactatatctaatcgtccatcaccaaattctctatttgactccacttgataattatccaaaagtcctaacaaaaaaccatgataaaaactttcataattgtcataaaagcttaaactctttttcataagagaaacaagaatagtagatgcttgtacaatatcttcttgttttaatgcttctacaaatttatttttctttgatgctttatattcagtaaaataatccataaaactttgatgataaatttcataaacttctttatttggtataatcaattcataagtatatttattgacttgtctctttatttttagatatcccgtcaataacaaaaaactataaacattattaatattatccatatctcgatatgttaattctggtttaatatctttgataatagatttcccttgcattagaatttcaaattcatcatgtaaaacctgatcactttgtttaatataattgacaaccagttcattactgctcgtatttgcccagaatgattctggttctggttttgattggatagcttttaaaacatattttaagacactccatggattatagatctctgtactgccaaaccgataaccatcataccattccttgacttcatctttttgttcaagaaaattatattcatttaataattcattcacttcctgttgagtaaaaccaaatcttgtgcttgattgttcatccatgatggaatagacattgaaattattgagtcctgtaaagatactttccttagatattctaagacatcctgtcagaactcctttttctagtgcatcattagttttcaaggctgatgaaaagacatttcttaaaaaatcaaccatttcgttataataaccatttgtataggctgattgtaatggaacatcatattcatctattaatagaataacatttttttgatagtgttgttttaatgctacacaaatataatagagtgcattttgtaaatcaatatcagtcacttgattattgactaaggattccaatcttttttttgtaataaaattaaccttttcactatgaagaagttctatattcttttccaaaacagtttgaattagtgaaagaaattgttgtttttgcaattcagcatttctattcttcatatcttttaaagtcataaatataacaggatattgattttgatgaagcatcacttcattatctttagaaacatttaatccatcaaatagataagcattatctttctccttgtgagaaaagaaataataaagcatactcatgtttaatgtttttccaaatcttcttggtcttgtatataagataagcttttcattcataacatcatttatcaattctgtcttatcaatataataatattgattatctataatttccttaaagttttctattcctactggtatctttttcatgatgatgctcctttcctatacttagccttttatttaattattgttgttttggttatgactgtttacctctaaaatctaaattttaagatacttttagaaccacagatttttgtattcccaaaaatatctcttttcatttatattagtaatcaacttctatttatatatatcttcattctgcttttgctttattattataccatgaatacgtataatttttatatatttataactttttataatcagaaaaaagatgttctttcgacatctatctcaaaaatattatttttcaatgagtttccatttgttctcataaggcaaaactttcatgtgaatcagttttaataatcattttatttcccaattttaaagaatatttttttctttgcattcaaatataaccttctctttttttgatgaaagaatgaatcatcatactataagctcaatttaactttttctgacataacttcctattaaatatctaaagataattgcctttcaatataactctcttgtttagcttgtttaatttcatcatcactatgtacatgacctatcaataatggtgacaaataatcatgtctcttatagttaagaatgacttgtttcttatcaacatttgcataacaatataaacaaccatgcatacacgtattatattctccaatatcacgacttggataacaatgacattgtgctcttaaaggttgagttttaatatcttttaaatcacaaccaataacattttttaacacttgtcttgaaatacacccatcttgttgtattccataagcacttaaatcaattgcttcagcacatgtttttaattgaatatgatatttttgagcaatttcactcattgcttttgctataagcttttgattttcataagaaacttcctgaataccgggaaagttcttttttgtcttagcatatagatcaataaaacttataatacatatttgagtatatcctgataactgtgaaagtatatcttcaaaacattctaaatgtttttcaattgtataatatttatttaaaaagataggatcatatcttaaagccacactttgacttcctaactgtcgtgaaagttcttgaaatgattgaataacttgttgataggttggaacatgtggttcgatttcttgaccataaggtgtaatcgtaacaaagaaataagggtgataaggttttagtaaagaaattcttgataacattggctgaggatttttactgcagaaaataagactatcaacaacatcttcattaagtaagtatttggtaatttgtttgggataataaggatttctaacatagacatagccttcctttaagcgttggaaaaaccaatcactaaaatatgctggaatatcagttcttgcacttgcgttaataatcattaaatgaaaagaaagtcatacatgtgtatgacttatttcccagatgggaagaactgtgctaaacttccagcaatagctgaaataggcattgtctgtaaaacaacatgtcctggtcctgtaattacggtattaaagaatccttcgccaccaaacatcttattcttaagtcctggaacagattgtgttgtcatcgtacaagttgcatccataatcgcaacatatccagtatcaacaacaatttgttgtcccggtgctaaatcatattctacagtagccccatcaatttctacaaagactgttccatgacctgaaagcttattcataataaaaccttcaccaccaaaaataccagtcatagcttttttgttaaagaagatacttctttctacagttggttcacttgctaagaatgctgatttttgaacaacgatttcttttcctggttcaatatcatactttctaatttcccctggaaatgatgaagcaaaagcaatctttccatcagcattggcagtgtaagtatttaaaaacattgtttcgccagaaaacattctaccaaaagcttttccaattccaccattacttgttgttcccatttccatacaaggatccatccatgccattgcaccactatcacttaacatgacatcacctttttttaaatgacaaacaacagctggtaaaggtgtcccaataatttcatactccatatttcttcctcctcatgtattaatgaaacatttatttcaataatccctttaacatcaattccccagctttaaagttagaagctagtggtacttgatgaacatcacacagacgcatcagagcacttacatcaggttcatgtggttgagccgttaatggatccctaaaaaagataaccatatcaatcttaccttcagcaacataggcaccaatttgttgatctcctccataaggaccagataaaaaacgatgaacctgtaaatgggtattttccataattctcaatccggttgtcccagttgtaaataattgatgtccttttaaatcagcttcatatttttgaacaaattcaatcatttcagcttttttcttatcatgtgcaataagtgcaatattcataatgtttcacctcatcctcattatacaggaaaaaagactttaataaaatgattaaagtctaaaatccctattaaatataatatttttgataataataaagtcttaaaatatcaaataatgccataatttgataattaaattgaaccccatcaaatttaccaggtacttgaataatataatgagcatgtaaatcttcaaatttcttatattttacattttgagtcattaaaataattgaagcagactgaatattttgatcaatattttctcttaaataagcatccattgttcttcctgtagcactaataaaaataacaatatcatctttatgaaaagaaaaatcattatcaaaatgatgatattcaatcacttcttttccaaaagtaataaaatcagtctggaaatcaacggcaatactcatcggataaagtgctcctataataatcacacgtttcttcttaaagattaactcacaaatctcctctaattctttaactaaatcatctttagaataagttgggtctagaccttcaagtaattgttgagctgacacacctaacatacgtgctctaatctgtgaaacacgtaacatataatcagaaaccaactgctgctggaaatcttcaaatgtatcaaaccctaaatggcgacaaaaatcaagaacttcatcctcactaaaatgtccttctttcattagtcgttgtaaatcataatcctccatctcaacataatttctaacaataaacaaaccaatcttgtacatatgatcattatctaaacaaccatttaaatattttaaaattcttgaaataacaatatccatattatccctccttatccttttacacaaccatcataccacataatccttcaaaagaaaaacaagactataagatgaatttttcaattaattccgcaacaacaccttcattacaatcagcctttgttgtataatcacataatgctttcacttcttctaccgcattaccagctgcaaccgataatccagcagcttctaacattgccatatcattaaaattatcaccaacggcaatcgttgcttcaataggaatatttaataatctagctaaatcatgtaatccttgtcctttattaacaccttttaaattcaattccatataacgcattgatgaataactaacatcaacttcatcttttacaatatcttgcattaatggttctaatgattgaagatattccatatctcgtgtttcaaataaaacttttacaatatcatcattctttaaagcatccagacaatcatcttctaaaacaatatattgaatcccttgattgttcattctttgtctttcattttcattcaaatgataaacataaatattttgaatagtataaatagctatacaaacatcatagtgtttaccaaaatcaaaaagttctttcatcttttcaaaagataaacctttcatctgtaaaatacgattattcttattttcagttaaaactccaccattagcagataaaacatattctccttcttcatcatataaacctaattcttttaaacacccttgtactgattgatataatcttcctgttgccggaacaaacttaactcctttttctttagcttttttaataagctctatatttctttgacagacttgatgttgactatttaataatgtttcatctaagtcacacgctattaattgatatttcataatttcctccttagataatcttattatattcttttatgcgtcattattttatttttttctatttaagaaatttatgttaaaattaaaaaaaggacgtgattttatgaatatatattcccaacttaaacactataaaaattttactgatactgagaaaatatttgctcaatttatccttgaacatcctcaggatattattcaactcaatgttcaccaattagctaaaagcagttttgtatctgtttcaactatctatcgggttatcgaaaagctagaattgactggtttatcacaattaaaaatgcttgtttcttcacaatatgaagcctatttacatgaacaaaaacaaactgactacaattatccatttaagaaaaatgcaactcactatgaaattatgcatcagatgaaaaccttatatgaacaaaccctttcatcaactttcaacctcattgatttagaaatgtttttaaaagtcgttcaaatcattgaccaagccaaccatatctcactttttccaaccatcggtaacttctttatggctgaatgttttcaacaaaatatgcttgaaattgggaaacgagttgaagtttatacacaatcttattatcaacattggtgtgcagccacttgtcaaaaagatgatgttgtgattgtcatttcttatgccaatcgaacaccttggttattagatgtaatgaaagatttaagtcaaagtgaagccacaattgtcttgatttcttctactcatgaaaatcaattatcccaatatgtagattaccatctttatttttgttcttatgaagattctgaagaaaagattgcttctttttcttcccgtatttctttacaataccttcttgattgcttatatgcatgttattttaatcgtaattatgataaacatttaaaatatcgtttagaaaattatattgattaaggtcattggctattcaccaatgacctttaatgctgcatctaatactttttctccattcatcataccataatcacgcatttcaatcacttgaattggtgtttgtccttcagcttttttaatcaaataattgagctgatgacgaacttgtggtcccagcataacaatatcccattctttaagcattgtttctgctttcgtgataggaacagcctgaatttcaatggataatcctcgtgcttgagcagctttttccattcttgagactaacatgcttgttgacatacccgcattgcaaactaataatattttcatgaatatcctccttcaagaggagaaaagcagaaaagtaataagaatatgattgataagtttctcctcttgacttcattttatcaaaagcaagactttcatgagaggttatttttaagattgaaatgagtttatcataaattatcaattcgtatcttttatattgaaaaaaatttatcaaaaaagaagcctaagcttcttcaataagacctatttctttcataactttataaattccatcatcatcaggatcagtaaaataatattgtcctaaatctttcagattttgtggggcaccttcataaaccacaccaatatttacttcttctaacatttgataatcattcatactatctccaaaaccaattgtatctttcatttgtccatggaaatgattaaccactttaatgataccatctgcttttgtacaatattttagaataatttcaccattgacaaaatcatcttcttccttagaaaaaataacaatattaaagaattcttctaagaaaggagcacaactataaaaatcatctttatgtggtgcaataaaacaaactttagttacaccagttgttaagatattaaaatctttgactggacgtcgattttcatttgcacgtctgacttgcaaaaatcttgcaagttctaagttgttttcacaatcttttaaatgcttttgatcaaagaattcattaactccaggcgtttgatataaagcgtcttttgtttctaaagtaaatagaatatgattattaataaataatgtcatgacttctgataaaatatattgattcataaagttttcaaaaataaattcattatcaataataacaaaaccaccagcactacaaataattccatcaaaaggaatctcttttaaatcatcagaaatagatgttggtgctctcccagtacataaaaatgctttgtgtccatttttttgagcttgttcaatcgcccactttgttttctcagttaccttttttgactttcccattaatgttccatcaatatcataaaatagaaatttccccataatattcaccaccgttttctattatacaaaagtttcattttattgaaaacaaaaacgacaagatttgaaaaaaaatcgtcatttctgacgattattatgataaaacttcatcaatcaaaataggatgcgcaacaaaatcatcactaaaatgatatgcacttaaaatctcttgtcttagttcttcacttaatccatgatttgtatgaacataaagtaagatatcatcttttttaacaaaatcaccaatcttcttatttaaaactataccaacactatgatcaataacatcatccgttgtttgacgaccgccacctaacttcatactgacaagtcctaaagtcatcgcttctaagtctttcacataaccttctttaaaactcttaatcgcaataacttccttggctttttcaaacatttcaggatgcttaatatattcatcatcgccaccttgagcttttaccattgcacatagtgtatgcaaagcttttttacttgcaataacatcttccaacatttttcttgctgctatttctgaatcagttttttgagcttgcacaagcatatgacttcctgcctgtaaacaaagctctaataaatcactaggtccatgtccatttaaggtatcaatagcttctttaacttctaagctattgccaatggcattacctaatggttgtgacatattcgaaatcgttgcacgtgtatctttaccaagtgattcaccaatttcaatcattgtacgtgctaagatttttgcatcttcaattgttttcatgaatgctccatcaccatatttaacatctaataaaattgcatcactccctgctgctaattttttagacataatagaagaagcaattaatggaatgcacgaaacagttgctgtgacatcacgcaaggcatacatttttttatcagcaggatctaaatgtgcactttgtccaataatggctagatggcaatcattcacttgtttcacaaaatcttcttcactaatcatgatatgcaatccgggaatggattctaacttatccagtgttccaccagtatgtcccaaaccacgaccactcatttttgcaactggaacaccacaagcagctacaataggtcctaaaactaaagaagtcttatcaccaacaccacctgtactatgtttatcaactttcactccagcaatggcgcttaaatcaataacatcaccactatgcatcatttcctttgtcaaagttgctgtttcacgcttatttaaaccttgaaaacaaactgccatcatccatgcactcatttgataatcaggaattttttcatttgtatagccttcaataataaaatgtatttcttcatctgttaattctaatccatctctttttttctgaatcaaatcaaccattctcatttttatcactccttatatgcttattatagcatggaagctattgtcttaaaataaaaacaaaataaagattttttccttttaaatagagacatcaattgtatcttttaatttttttatttgaagttcatattgttcattttgataagcttttaaagcattcgcataatattccttttcacctcgacctataaaataaacaatagaatatccatgtgtgctttttaaaacagccatatcacctttttgacgtgaagaagtataaatccacttttcaatctctgcattactatctcgtttagataccccttcataatctccattattctctttataatcagaatatttttgattatattgatgaaatatatccaatgttaaatgatcctctgcctttagcttcttatataattcattagcaaattcctgacaagcagtccattgtttatctgttatagaagatgtatcagtttctcttgcatctaaataaatagtagaaatatttacttgatgatagattggtttttcacgtttaagaaacataacaacatcatagctgttatcaccttcatacattttcacttcatttttttgcattgaattattaaacaaaggaatttgtaaataatttggtaaatcttcttttcttagattgtctcttaaacttaaatctgtttgttgataatatgtttttaatgattcatcaatatgctttaaaacaaatgctttaaattcattttcagtatgtttttgatttacaaaagcatcaataatctttttattttcatcatttttttcaaaagctatataacgaattgtgactgtatcaaacatatcttgatgttttgaataatagttttctacttctgtttgagtaggattaacgaaaagtttttttgaatattgactagccaaggcaattttttgatactgattaataatgagttctttattcgcttcaattccatagatagaatgtaaataatcatctaatttaatattattttgttgacaatatttttcaatacttgcaaaatatgcatcagcttctttttctatatctgtagttactgtcatttgatcagacttagctgcattatataacgcattaatttctttataatattctaatgcctgtttagcaaaatagccttcccaactttgttcttgatatccttcaattgtgcatttttgatcttttaatgaattaatattatcatttaattggaatggtaaaacatttgcattatcatcacctaaggcattttggacttgggctaaatactttctaaaagcataaccataaaaaaattcatattctttttgattgttctcaccttttaattgataagataaatgtaaattccctaaataatgattttctgcttctttttgacatccacttaaaagaaaagtgcataccaacaatagagataacaacttttttaacataatacaactccttaatgaaaggcacactttacgtgtgcctaagctttaaattaatcttcttttttcttttttaagaatactcctacacctgtgataagtgctaaagaagctaacccagcaaatggtaaaatatttgtttcatcagaagtttgtgggtttttaccttgttcactcttatctggtgtttgttctttatcattattttgatctttatcttgattttgatccttgttgtcatcttttactttatcagtaacaggacgatcaggattataagttttaactctatcatcatcaataagaccagaccagtttaaaccataagcaacatcataagtattaccttcagcatctttataacatactaaatcaccagcaacatcttctttatttgcttctacagtatccatattagcagggaactgcattggtaataaccccttaggttcactcttaccattaataatatcaaagatagcttgatcactaacagagaagctagctaaaatagcgtcacatcttgattcaatttcacttaaaataactggacctgaacagttaactgaagcaacaattggaatattctttccagttttcttcactgcttcataagcattattaaatgctgttaaatcatattcattagcaatcttagatgtatttccataataagatctattttgttgtttaccatctacaatatcaccagcaattgatgtttttcttacatttttaccatctgctgtataagatgaccattgtaatgataatggatagaatgaagattttccatcttttgtttgaataccagccttgctaaatagagaaccattatttggtgatctcataccaacaataaccatatctacatcacttaaatctggagttttcacattaacttttgttaaatttccagctttatctttttcaattgttatttcatctgtaataacttttccataaattccttttgctgtttctaaatttaatggagttacaacactagcaggactatttccaaagattgcagtttgtgcatcatcaactgaatgaggaatataaacagtcatatctttaggagcttttgtttgttgacttgcttttttaattaattgatccttattctttaataaaacaacagaatctaattgagcttggtaaccagctttttgatttgcaggttgagttgctctagcaattgattcatctaaatctaaatatggattttcaaaatatccagtttgtaaagttaaagttaataaacgttcagcagattttgcaaaaatagcttttgcttgattaataccatcttctttaaccattttatcatatgaataacagattggtgcattatcattatttcccccaaacatatctccaccaactgataaaattctatgatgtctatcattaatcgataagttttcaacaccccaagacatacctaatccaccaattgataattcaactggtgcatctgaagttacaccccagtctgtacatacaaccccatcaaaacctaaatcttttcttaataaattcattttccatgaactataagcactaccaacacgttctccacctaatggacttccatcagctttaattccaattgaataagaagtcatgacagcagcagcactaccagtttttcctttcaatttaaatgaagctttaaatggatttaagaattcttcataatttccaccaggataaacagcatatttaccagcaattgtgtgtgattcacgtccaccttcaccagcaccatcaccagggaagtgtttaatcatacagttaattgaatcttttccccaaccaacatctttgccattcacataagtcgattgtgatccatctacataagcttgtgccattgtttgagataatttagaattttcaccaaatgttccaccattacgtaaccatcttggttcagtagctaagtccatttgtggtcctaaagctgtagcaattcctaaagctctatattcttcagatgaagctttagcaaaattatacatatgttcttcactaaatgttgcggctaatcctaagttagatggccatttagaaatatcagtagatccacctgcaacgttatctgaatataaatctccagaaccagcagttgaacgagggtcagatgaaaaatcaacaggaacattgaaatcagattcttcaatgaacgcttgcattgcatttgtccatccgactgcatctttaacatcatttcctgcagcatcagtaatatttcttacataactgttagttaaataatctttttgtgaatctgttaaaccgttcttacttacagcttcatgcgaactaaacaacattaaaccagcaatttttgtaatacctttagggacttcaactgttgtctttttatctttatcaacaacaacttctaccatttcagtatcattaaccaattgatcagcaagatcttttgctctttgttctacagtcaaacgccaatcttcatacttatccaattccccatctttgtccatatctttgaaggcataagtatattctccgtctttgacttcaagaatataatctttttgttctccatctttttcttggactaatgaagcaattgttttccctccatttggattcgttacaacagatacttttcttgtttcttctttcccattaacgactgtgtaataatccttaatgacttttgtgtaggcttttgtttcagcagcacctacagttccgccagcaagtacacttaatgcagttgttgaggctgcaatacctgcaacgaattttttcttcattctttactttcctcctctaattgattttaccaactacacatattctaacacaatttacaatgtaagcgttttacttatattgatttctttttccttaatttattcaattgttcataattaaaaaaacaatctttatatgtagactgtttttgttaattaaacaaatttattttttattatttatatttttagcttgtagataggcaaaacttaacttataaacgaaatctataatagcaaacaaatataaataataatctgttgtataaggaataccaataaatgtacatcctaaatatttaatattcaaaatacttttttgtccaataaagaccttttgaataggaatattcataagttgtttaaattgtataatttcatcaaactcatgactttctaataaactttcaaaagactcattaggagcaataataaaaattaaatcatccttatcaaatgtatccaataaatgattaatatccttcttatttaacattgaacgaatataaacctctttaccttgaaaagataaaaaggtttgaaattctctcaaacacaaacaaaaattatcctcgccacaaattaataaccgtttagcctgaacaatgtcttgaccaatcttgccaatcacttcatgtgatatccctgcatcatattcttgaaaataatgttcttggtttcttgtcatttttggataatctctatcaagatttaaactgacattcatttctataatattattaagagacttacgatcctctatctcacttgctaaatgactaataaaaactttccagctttcaaatcccatatcatgacaaaattttaaaactgaagaacatgaagtaaatgagcttgtagctagtgaagttaatgtcatattataaacatcatctaaatgttttaataaatattgtgcgatctgatagtaaacatgatcaaagctatatgtatcgactatcgtttgtactttacttattatcatccccatacttattttctcctattcatttaaaaagcattcacaaaataataattctaaaaaatacataactaaaaaattataatcatagatttgtggtgtttgagggaattgaatataataatctattttatctaacgtttcaaattgatcagtaagtgttaataaaacttttgaggatggagaaaaatagatttgatgaaatttctttgaacattctcttatatatcttccactcgcacttagaataatcgttatatcattttcattaaaatcatatgggatattttctaagctattataatcgacatatacttttttcccgatacttatcatattggtttgaaattcaacacataaagaaagagggtatatggctccaaataaaaaaattctttgactctctttgattttttgagataaatcttgaatcatatttttgatatgatgatcatcatgataaatttcattgatacgttgataataattttgttgatatgttaaagtataattactttttaattgattcatctttacatttttggatttgattaattcattttgaaaatctaaccatgaatgaaaaccaaataaatcacaaaatctatgaatacttgctcgtgatacaaagcattcatcagttatcattttaacacttaaatcatcaatattgggatagcgttgaataataaacattgctatattataattaacatcatgctttatcacagtattaacaaacaaaattaatcgtccaattactacattcattatcttttcctcatctatgttatttcttcaaatattttatcatttctcctctttgatgtctataaattaaaattatctttcatatatagaaaaaacaaccttagtttaactaagattgttttactcaaattgactatcaacttcaaaaatattatgtccattcaaataatccttaacagacattctttttttaccttctaattgaaattcagtaattaaaaatactccatcatcaactttcacaccaatcgcatccttaaatattttcacaattgttccactctcttgatgagcatgatgcttcattgcattttcacattgatgtacttgaccagcccagattttcactgttttcccaagataagttgtataacttcctggccatgggtttgttccacgtactttattgtatacttgtaaagctgtcatatgccaatttaaacgttcatcttctcttgataaagtcggtgcataagtcaccaatgattcatcttgaggaatacttgcattcgttcctgctaaaatagaaggtagcgtttctttcaataaatctgctccaaggatacttagacgatcatataaaatacccactgtatcatcatataaaatcggtgtttctttttgactaatgatatgacctgcatccatcttctttaccatatacataattgttacaccggttttttcttgaccatcaataatacattgatgaacaggtgctccgccacgataaagtggtaataatgaagcatggacattgacgcatcctagacgtggtgcttctaagattgcttgaggaacgatttgtccataagctgcagtaataattaaatcaggctttaaatcaagaattgcctgataatcttctttaatcttaactggttgaatcactggaatatcatattttaacgcttctactttcacatcaggcatcgttaatactttttttctaccaacataacgatcaggttgtgaaacaactcccacaacattatatttttcttcaatcaacatctttaaaacagctaaggaaaaagatgctgttcccataaatacaattctttcttctttcatgcttttcaactctctttctttattagtataccataaccatcaatatcatactaataaaatcagagaaaattgtcgcaacaaattcaataatagaaacacacccatcactcatttttttcatcaaagatgaaacatgattatccgatgaatcttgtaaagtaatatattggttttcacttatttcttttgaagaaacagtttcttcaaactgatcaattgatctttgaaacattgtcttagaaacttcttgattatcaaagaataaagcaattatacacattaataaaagtaccaaacccaaatcaataagaaactgtttcatgcacttaaatactcatccaataccaaagctaaaatatttaatgaattttgtacttcttcaaatgtgttttgatttgctccaacttcaattaacatcatattatcagttgttccttgattataatgactttgttttatataaactcctcgacatattttaggaatcttttgattaagcatagatgataatttttcacaacgtttctttactgctggataatgttcactgccttttccaacaacaaacattaattttgcataatttttatgatcaacagtaattgttgataaagattttttaattgaatcacgatgaaaatcaatgaccaaatcatattcaccatgtttcgataaagctttattcaaatattttttagaaactgtataggaataggcataatcaatatgattcttagttttatacagttcaaaatccgttgtttcataattcacatcatatcctttattctgtaacaattgcattaaatatcggctcccttctttaactgactgacttgcatattcttccccttgatgtgtgttataaatatatatcgattttccattttgttgtttttgaacatcggtagctgaaagtgacgctgcaacattttcaatattctcactaaacactttttgaaaaggaagattgagtaaaatcactattacaataataatctttaacacaatcttgaaattattattcattctatcttcctcctttgactatacatcaaatcatatgcaaaaaaaggtacatttagtaccctttgttatgataattttaatatcttaaatgattaatactagaagataaaagtttagataacatttcaatatcaaaatcaatttgtttatcactcatcacaaattgattttctattgggtttaaaacttcatttaataattgaatacgcttttgttcatccaattgtccgatttcacctaaaatcaaacgtctttgtacttcatttaatcgtccttcatatcttttccttttccctacctttaaagctgaggaaggatctaatgattccttaaaatagccttctaataaattataaacatcactcaccaaactagagacatgaataacagttggaacaccaattgcaatcacgggaacccccattgaagattcactaatacttttacgatgattcccaattccactacctggataaatacctacattattcatctgaataacatgacagattttctcatagctttgagcacataatgcatctattgcaataatgacatcaggatgaaattcttgaactaaacaatgaacaatatcggctgtttccattcccgtgtgtgccataactcctggagcaatacacatacaatcatagtattgattttgatgtctttcgtctaatggataatgatgggtagaacgtaaatatttaattgtacgtggtcctattgcatcacttgttaaagtgtcattgcctaaacctacaaataataaaagtggatcaattttatttgttttacttttgataaagcttgttaattgacgttcaaagtgttgagaaatggttgacatttcttcataatcaggaaaactaatttctacatattgtccgacttcatggggataaagttcacttgtttgtagaatttcaaatgtttcaatcgagacatttccatcttttttttcatgatgtttataatctttatcttttgttgcatgaaccaaagattcaatcgctaaatcacttcgcgtataatattttttcatattctcaccacattaatcattgacaaattaaaaaaatataatcatttcacaataaaacattgcatttatcgtctatttttgatagaataacatggcgaaagacaaaagcgaggtgaaagaacaatggcaaacatgaaacaacaaatcaaacgttataaaaatgataacaaaaaacgtgcaatcaacaattcttataaaagtgctttaaaaacagcaatcaaaaaagtaagagctgaagttgaagctggaaataaagaagctgctatcgctgcttacaatgttgctgcatctaaattagatgcttcagtaagcaaaggaattcatcataagaactatgctagcagacaaaaatctagattagctaaattagtaaactctatcgcttaatgtgtgatagagttttttattttgacaaatgttttattcctcttatgttatgatgtcgtaagaggtgatatatatggtttgtagtttaattggagcttttttattagtttatgttgccgtgattacttttatgaatatattaggctatcctttaagtaaatttatgttagattaccaatatccatttttatctataaaaaagaattgtctatttgcttttattatacaattgtgtgcaatgttaactcttttacaagctggacatatcattgcttttattttaccagtttttttgattcaagttttatgtatttttttaagcatctttttatccattgtaacgctattttattggtattctcatgatcaagaaaaacggtttgttatggctcctttacttagtcttattacattatgtttttattttactatcttcaatacttattgaagtttttttatctcataacatcttaaaataacgaatgaattgacaaagattttgaaaagacctatcatataaaagtataaggaggatattatggaaagatcaagtattcaaacaaaagatacatgggatttatcttacatttatcaaacaaatcaagaattttatacagatttacaaaaagctaaagatttattacaagtcatttatcaacaaaaggatatatttttaaatgatgtagatagctttctaaaatttcatgaacattatattaagctttctcgctatattcaaaaattacattgttttgcgcatttacattgtgatgttcaacctaatgaacaagattatcaaacaatgtatgcggctattttatcattttatgaccaagtttcttcaaccctagatttttatactgttatgatgatagatcatagtgacatcattacagactacttaaaagatgaaagattagctgattatcgttattctattcaagaaatattacgtcaaaagaaacatgttttatcacaggaaatggaaactcttgtttctaagacgtcttctatttctgatatttcatcacaagtttttgatgctttgcgtttagattatgaacctgtgcatgtagatggcgaagaaaagtttttaaatagtgcaacactgactgaatttcttaaaaataagaatccggaagttagaaaagaagcatatcatcatttctttaaagaatataaaagatttgaaaatgtttttgccacaacactatctggagttatgaaaaaagatgctttttatgcagatgttaaaaaatttgctaatccattagaagcaagtctatttgatgataatgtgcctacatcattattctttaagatcttagataaagctaatcaacaatatcgtccattatttcatcgttataatgctttaaaaaagaaaaaacttaatttagagacaatgtataattatgatttaagtgttcctttaattgaatatgaaactaaaaaatatacaattgaagaatgttttgatatcattttagatgttgtcaaaatatttggtgatgactatgttaagattattcaaaaagctcgtgatgaacgttggattgattattatccacatagtggtaaacgtattggtgcttattctagtggatgttatgatacaaaaccttatattcttatgaactttattggtgattataattctttatcaacaatgattcatgagttaggtcatagtgctcatacctatttatcatgtcataatcaatcaccagtgaattgtgattatcgtatctttgtagcggaagttgcttccacagttaatgaaacacttttaattcattacatgctagagcatgcaacatctcaagaagaaaaggcctatttcttgtatgaattattagaaaattgtgttggtttgatctttagacaacctatgtatgctgattttgaacatattttacacacttgggcgcaagaagggaaaccgatgtctgctcaaatgattacagatttatattatcaaaagaatgctgaatattttggaaaagatgtcacaatggatgaatatgttggatattcttgtttctatattcctcatttctattataactattacgtttataaatatactttaggaatgactgttgctttggctattgtttctcgtattttaaatggtgatgaaaaacaaaaagaagcttatcttaacttcttaaaagctggtggcagcaaggatcctgtagatttattgaaagatgctttggttgatccaatagatgatcaattgtatgatgatgcattccattattttgaaaatattttaaatgaatttgaagaaattatttagagcagctcgtttgaactgctctttttacatactataatcaataaataatggtaaatctggtggaaagaaagtccaaaaagtaaataatataatcaaaattataataatagcaaagcttatcttcatagaccattggatatgatgtaccctcacccaataaaaagacatatttccaataaaaatactcaacaacaataagaaaatatccaaaaacaaactttcaattcctaatccaaaataataaaaatagtaaatcaaaacaacacttaatattcctacaatgatacttataggaatagcagttaaaaatgataaatctttatttttatatcgataccaaacaatcaaacttacaaataacatcggatataaaacaagctttaaatgttcaaaaatactttcattaaccggtgcaatcactgcaacaataggattagaaaaaacattataagcaaaatgcattaatgcacctaaaacaaattcaataatcgttatgatataaatcataaattatcaccctattcatcatatgtagaaatgatggaaatatgcaagcatctagtcaattctcattgtatcaatcattccattatcaaaaaggactgaaataggcattctttgatcatatgaatcatgattgatggaaggtataaaatcataatcatttaaatagatattgatgtaatcttccgttaatccaatttgttcaccaccatttttcttattcataataaaagcaaaataaatatcataatgttgaatatgtggatttaaaaacaattgatattctttataaccaataacatcacttatataagagtaactaccgatattttctttataagaatagtctttttgttgatcactcactttaaaatcaactatctgacaaggtgaataagaaagatgaacagatgaacttctttgtactgtgacttttaattgtttagatttaacattgtttaacttgatatgataagccgttaaatattgtgacttgttatagccataaactttcacatcaaagaattgatttgaacctttatctaataatgtttgagtataattcttagattgcaaactatgagtttgataagcaaaatgaggataaattaaattcactataaaaactactgttaaagtcaacaataaataactaacccaacaaaatatcgctggataatgaaaagttgtttttttaatcgctttatttttaaaataagcataacactccagtaacattgatagtaaaattaataataaaagaagataaataatcatattaattggagctaaattttcaaataatgccacaacattcatagatacataacatattgctacatatataaataaacgtttatcaatcaattgattcataccaaaacatatcaatacaacctgaatcatatgaatcattaaaccaaaatagatatatatttgtggaattgtataaggaataatcagactacataattcaatcatagctataaccattgaaattattgaaaaaacatagccataagttaaaaccttattttccctataaatcattcttatagccaaataaaaacatagtgaagatatcaatgaatgaaactgcaatgaaaaaataaaatcaaaatgcacacttcctaataaaaaagcaataatcaaataaataatcacatactgaaaagaaccgattaattctctttgattcttatgaagtttcatatcacttcacctccctatcctttcctaccttcatcataacatcattctttttaagattcaaacaaacaagaatgtttaaaaaaagtgagcactaactcactttataacctaaatatgccataaattctttttcttcatcaactgataatggttttaacaaagccgttaatccaccaatcttttctttattagccatcataataacaatattatgatctttaatcacaaaccctttttcattaaccccataagaaaatgtctcagttttcttaatctttaatccttttaaagatttcactaacttatttgcatctttttcatgataacatgtataagttattaaataaggattgttaggtaatgccaattgattcaaagtatctttttgaacataatcatcagcatataaatttccccataccgttgataattgacgattttttaaagcataatcatttaatttgattttaatacgatcacgtatttccatattcatcacaacttcttctcgatcttttgcattcatcaattgtaatggtgattgtgtttcatttaaataataagctccgattgctgaagaaaccatcacaacaaaaaccaagaaagaaactgaataacgataacatttatgataaacatgattttcttctaataacccttgatttatcttcaaataataattttttctacgatgatattgtcttaatgattctaaaactttctttgtaattacggaataaaggaaacaaacaaaagtcagacatatacaaaaagaaagaagtttagcaaactctaaattaaaatataacaaaatacctttaaaaaatgtatgtgatacaattgaataagattgatttaatactgctaacatgaaatgaccaaatggtaaagcttttaaaaataattctaaagtaaacaaattcgtatatgtaaagttttgccaataaataataataaaaacaacactagcaaaaagtggtttagaaaaagaacccaaaacatttttaattgtattgatcattgtaaagaaaataatttttactttttgaattgttgttaaatcttgaaaagttccttgaacctcttggtaatgatcaaagatttgaatatatgcttgaaaatagcgttcaaagtaatcacgatgacgacgtttaaacttcttttgaaaacgaaaacgaatataagcaaaactatcattttcatcaacttgtaaataatgataactatctttcaaacttaatttttcttgaatcatttttggctctacttttttaaagaaagacaaaataaagattgttgaaaagaaaaatattaatagtgtagcaaaacctaaaatataaaaacctgttgttgttgaaagatcagtctttcctcctagatactgcaaagcagttattcctattgccttagcaaataaaaaatcatagactttcattccaaaaccatatatccaattatataaaccttgcattgaatcaattaaaataacatttaaatacataaagaaaaatgccaaaatgaatgatccacaaacaataaacaatattgcaaaaataatcattccaattatacctgcaatttgtgaagctttatctaaatataaattgatttgttttaaagttgttttatattgtgtattgtttttttcactgatttgttgataagcttcatctatttgttcatcatctcgatctttcacatgggcataaacttcatccactaatttctgattccttaaatctaataaatccctataattcatcaaaatctcccctttgttttcttattataacataattatcacttcatttaatgagaaatatgcttttcttttaagtatacaattcttattttttcaagtataataaataaagaaatgaggtaatattatgttaagaaatcagacacgttcttttaaagtaggaaatcttaccctaggtggtaataaccatgtcatcattcaatccatgtgtaataccaaaactaaagatactaaggcaaccattcaacaaatcctagaattagaaaaagctggttgtgaaatgattagggttgcagtattagatgaagaagatgcttatgcgattaagacaatccaatcagctattcatatccctttagttgctgatattcattttaactataagttagctttgattgcgattgaaagtggagtagataagattcgtattaatcctggtaatattggttctatggaaaaagtgaaagcagttgtagaagcttgtaaggctaaacatattcctattcgtattggagtaaatggggggtctttggaaaaagaaatccttgaaaaatatggtaagccaacagctcaagggatgattgaaagtgctcaaaaacatattgatattttagagtctctcaattttcatgattatgcgatttcattgaaatcttctaacacacttttaacaattgaagcttataccttagccagtcaaacttttgattgtccattacatattggagtaactgaagcagggacaaaacttggtggaacgattaaatcaagtttaggtattgggactttattatatcagggtattggaaatacaatccgtgtttcattaagtgctgatcctttagaagaaattaaagttgctaaaactttattaaaagaattagaactaattgatcatgtaccaaccttgatttcatgtccaacttgtggtcgtattcaatacaatttaattcctattgcaagtgaaattgaggacttcttgaatacaattcatgctgatattacagttgcgataatgggatgtgccgtgaatggtcctggtgaagccaaacatgctgatattggtattgctggtggagtaaatgaaggcttactcattaaaaaaggtgaaattattagaaaagtaaaacaagatgatattgttgatgtattaaaagaagaaattttaaaaatgacaagagaataactcctgtcatttttttatgaatatcttctttgtaagatttttaaagaaacaaagtaacctaccaataaacaaagcattgcaatgacaattccaatcatcaacaaataaattggcttcattgtcagaatagatgtcatatcaaaaccaaagaaagcaatcaaataaatagcaatggatactcctgtaaaaaccaaatatacaaatgccccttttttggcacctaataaatgataccctacagaatttaaagccatcaaaatagttccaaaaaccattcctgctccccataacattaaaccaacatcaagcgacacaacttttaaataataaacaaagaataacatatacacaaaggcaacaaccatactgagaaaaagaaagatgaaacccgtaataaatcttgctaaaacaacttcttgtttggtaactggtagtgataaataagctttttcaaaattcgtcctttcttccttttccataaccacttgtaaaaaggcacttcccccaactggtatagataaaacaacaataagtgctaagccataaaaattttgaaaaaagtaaccaatagtaacagatgttaccactaagcttaaaagtgataacaattgccctttttgtttaagaataaataaatctttataaattaatgctttcattgactcttgtcccccttacatacaataacatcacatcttcgattgttgctttatcaatcactaaatcttgataaattttagcaaaactttctctatcttcaactaagactttatattcaaaatcttctttcttataagccaaaatatcttttttatccattgcttcaaaaactttttgaccacaatgaatcaatccaaaatgatcatgaatatcttcatatgatttagtaaacatgatttcaccttcatgaataaaaataatataatcagcaatcttatctaaatcacttgttatatgagatgacattaagaccccattattttcatccataataaattcctgtaaaatttctaaaatttcatcacgaataatgggatcaagtccgcttgttgcttcatcaagaatcaataaacgagggtgatgagctaattcagccgcaaaacataatttcattttcattcctttagaaaacttttcaatacgtttatttcttggtaaatcaaacttatcaagatattcattataaagcgtactatcccaattatcataaaccaatttcatcatattttcgatatcctggcatttaaacttttcattataatgacaagtatcataaataattcccattttttgttttaaacgtttctcgttttccctcatgttttcaccaaaaacatagatttcaccactatcttcttttaataaattttcaatcaaattaataattgtagatttcccagcaccattttcaccaatcaatccaacaattgttccagtaggaacagataatgaaatattttttaattgaaaatcatcaaatcctttatttaaattttttatttctaaaatcttatccatattaatctcccttataaaatagcgtcaatatttcaatgagctgtgacaattcaataccagccatcttgcctgtttcaacaacttcttcaagcttttcttcaatcaaacgcaaattttcttctcttaaaaaatccttattttgtgctgatacaaatgttcctttgccagcgacagtttcaataaaaccatcacgtgataagtcttcatatgcatgttgagcagtaatcacactgatatgtagtgattttgccaatgcgcgcatagatggcaaagcatcaccaggtttcaattcaccactcataatcatagcctttatttgtgatgtgatttgctcatagataggtttatgagaactattgctcaagataatttccaacttatgcacctccatctgtacttattgtacaagtacagtatatactatataagtacacttgtcaatgactctagaattttttatttagcatttttttctcataaaatagtcattctttttctaggtaaaacataatctatagataggaggaacaaaagatgcgagatcaaaataacgaatatatttcagcattaaaattagaagactttaaaattctgttaaaagaatttgatattgaaatggatgaagaaacacagagaatggttctctctattattaaaaataatcagtttgctttagtgcatgaccaataccaatttattatagagaactatataaaaaaattgacaagtgaattcacttgtcaaaaggttgttgttttattaaacaattattttaaaccgctattgaaagtttgatttttaaacatttcaatttcttctttataaggtgcctgttcacctatataaggtgtttctaatattttaggaacatcttttaatttaggatgatgaacaatatgatttaaggtttcaaagccaatatgtccatatccaatattttcatgacgatctttatgagccccgcgttcatttttagaatcattaacatggacaactaacaaacgttgtaacccaatcttttcatcaaattcatttaagatttcatcaaattttgttaaatcataacctgcatcatgaagatgacatgtatctaaacatacacccaaaagttcatgatgttcaacgttatcaataatataacgtaattgatcaaaatctcgtcctaattcacttcctttcccagccattgtttctaaagcaatatgtacactttggtcaggtgttaaaacttcatttaaacctttaacgatttgttgaagtccaacttcatcacctgctttaacgtgtgatcctggatgtaagactagtcgtgatacaccaattgcttcgcatctttggatttcctgttttaaaaaactcacagctaattcataagtttcaggtttaattgtattagctaaattgatgatataaggtgcatgaacaacaacatcatcgatattgatatgattttcttccatcaatgcttttgcttcatcaacgcgtagttgatcaattggtttacgtgcggtattttggggagcacctgtataaaacatgaaagttgtagagccataagacaaagcttctttaactgagccaagcatcatttctttcccttttaaagagacatgactaccaatctttaacattattgtgattccctttcacgtttttctctttgagcttgttttgctcgttctttcttttgacgcttaatatcttgtctgataattgctcttttttcttgttttaccattttttcaataactctttttcttttctttttataaccaggtttaacttttgttggttttctcacaatagaagaaatcttttgttctaattcagtttgatgtttttgtcttgatttacgtttttcacgttcttttgactcagcaaattgatttccttttaattccttcacttcaaaatgaatcccttttttctccaatgcttcaacaatactttgattacttgtatcatacatactataacattcaccagtatattttccacgtccacaacgtccactacgatgaatatagaaatctaattcagttggaaattccatattaataatatgacttgctccatcaatatcaatccctctagcagcaatatcagttgccacaatgtattgatactccatatttttaatacgtctcatcatttgacgtctttctcttggttcaaggttcccatgaatttctccaactttataaccatcttctcttaaacgatgagcaatgtcctctacctcatttcttttattacagaaaatcaaacaaatataaggatcaataatagacataacttcttttaaaacttcataacgttgacgatgttttgtaggaactaaatagtgagagatattacgtgaagttgataaatgttcatcaatttcaataatcttaggtgctttcatatatttttgtaagaatggtcttagcatttgtggaatagttgctgaaaagaccatcatttgaagattatctttcatctttgatagaactgcatcaatatcttctaaatatccaaattctaatgtcatatctgcttcatccacaacaaaaatatctgctgttgtaatacgtaaagcttgttcatctaaagataaatctttaattcttcctggtgtcccgatcacaatatgaggttgtgttgataatttgttaattgctttttgtttatcacttcccccaataattaaagatacttttaaatctggattatgtttaacaaataattttgcatgttcataaatttgtgatgctaattctctggttggtgctgtaattacagcttgaacacaatccttttcaacatctatcatatccataattggaattaaaaaagcatgtgttttccctgttccagtttgcgaaatcccaatgacatcaatatatttataaaccaaaggtattactgatttttgaatgtttgtaggacttttaaagttcaactcttgaattgtttctttcacaaagggttgaaattgatattgttcaaataatttcataaaaacgcctcctttcaagccttttgattatacaataaattgtctaaaaaagcaaaatactttgcttatattcttcattttttctaatgaacactctttttgttttcacatatattgatataggaggtgttaatcatgtatccgcaatatccacagattccttatgagtacccaccatatcaatccatgccgatgatgtatccaatgatgcaaaagccttcacttttacaatctatgaaatactctttaaatcaactatcaatgtcatcaacgattagaacagcacaaaaaaccctttatactgttaatcaaattatacccattgttaatcaattaagacctgttgtacacaatgcaaaaacagcttttcgcgttgttaaagcagtaaaacaatttgattttgaagatgtatctgaagaaattgatcaaaatgttaatgaagatagtcctgtttttcaaaatatgtttccaaaagaaaaagcctaatcaggcttttttagtgtatcaataattccttgtggataatcataaacacttaacaaggcaatcgcattaccaacttggcaaaccccatcatgaatcttataatcacaacatagttgtccatcttttacataatcattaaaacaatatttttgaatatctgcaaaagctttaataatagataaatcatgagttgttataaaaacttgtgaagaactttcaaaaagatattttaagatagcataagaaatagccactctttccttttcgtttgttcctcttaagatttcatcaataaagattaaacaacgatgagctgttgacatatcaataatcttctttaaagtcttaacttctttgacaaaataactttcaccagattctaaatcatctttcatatgaattgcactacatacatgataaggataatattgccattgacttgcaaaacaagtatgcaatgattttgcaagcaaagtattgactcctatcattttaataaaagttgatttccctgaagcatttgatcctgtaataatacaagattgatcacttgaaaaactatttttaactggattttctaataatggatgataaccatcttcaaaagcaataataggtgtagatgataactctggaatacatgtttcatatctttttcttagcgtcataactgaaattgccatatctacacatccaacatattcataagcttccaaaacatcttgagctaattcttctttatgtttaaataaaatcaagcattgaaaaactggaatcatgaacatccctttgataatctccatgaaataaaaagcatcaattttttcaagctgatgaaacatccgcgttattaacgtatactttttcactcttttcaccatttttgctattttatgttgatcttctaaagcataaacatgtgccttcattaattgatccaaacattccaccaaataacaataacttaaaacttcactcattaaatgctctgtcttatgcttataatatgcataagtggtcatcattgttgcaaaataaaaacctacaaataaaagaatatcaattcccacaacaaagtaaaaaccaaacaataaaaagggaatcaccattaatgtaacaataacaatccgatcaataaaagaaaaaatatcttcatgttcaaataatttcaaagattcactatattgacgacttaattgatacaaagcataaattgattgagcaagagttgtttgatcgtctagtctagcaatcgtattttctaacaactcatgatgtgtaggattaacaaaaaacttaccatacatatattctcgtcccacatcactataagtaaaatcaactctagcaaaaacttcacgcatctctaaatcatcaatcacttgttcatctatatctttttcttgaatcgcatcgcgatattcaccagtgatttcactctttccattagccaaacgaaaatcaaacattgaaatcaaacgtcttttcgtcaaactattcgcaataattcttatgattaccatcatcacaagcatacaaagcataaccaataacatgacatacatgataaagcccccttttgtagcttcactatacagccaatcccttagggaatgtcaattatttttttaatttttgataaatttgatatgcaaatacctttatacgtggtgatgcatatatcgaaaacgaaatcaaaacaagcacagatgatatcatttcataaatatcatcttgtccctgagattttgaagcaagcataactgctaaaaacattaaccaaaaaatcaatttttcaaaatcaattgtaaaacgttgaaaagtcgttctttctttcagtttaaaggcttggtctaaatcctgagacaatgaactcatatcttcttgtctttcaatacattctcgcacagaatcaatgaaatcaatagatgtttctatatcatagatttgtttttgataatcagcttttttcttttcaaataattcataatgatgttcaattaaaatttctttaatttcagcaattgtaaaattcatttgtcttaattgttttattcttaaaagcatttgttgttcatgtttatgataaacacgataacctttgttatctttttgtggttgaattaatcctttttcttcatagagattaatggcttttttagaaattcttaattttttagataattcttgtatatacataataactcctttagttgataatattattatatcgagattatttttgataagcaacaaattatggtataatgctagtgaggtgattgaaatggaagtaaaagccatagttcctagaggttattgtaaaggtgttgtcagagcaattgatattgctaaaaaagcaagttgtcaaaatgatgatgtttatattttaggaatgattgtgcataatcaatatattgtgaatgctttagaagaattgggaatttataccattgatcaaaaaggaaaaacaagattagaattattagatgaaattgatcatggaacagttattattacagctcatggagcgagtgagcaggtgtttaaaaaggctcaggaaaaagggttaaaggttattgatgcttcttgtttagatgtcattaagactcatgatttaattaaagataaattaaaagatggctatgaaatattatatattggtaaagctggtcatcctgaagcagaaggtgctatctctatcaatgaacaaaagatccacttaataacaaaaaaagaagatcttgataacatagattcagcaattcattatgtcataaccaaccaaacaacaatgtctttatatgatgtctatgatttatgtgaatatgctaaagaaaaacttcctcatgttgaaatagctaaagaaacatgtacagcaaccaaaatcagacaagaagctatccaaaatatggatgaagatattgatattgtttttattgttggtgatcctcattctaataatactcaaaagcttgcatcgattgcaaaaaagaatagagaagtttatatgattgaaagcattgatgatttagatctaaaaaccttgaaaggaaaaaagaaggcagctgtttcttcaggtgcttcaaccccaacatatttaacgaatcaagttattgattttttaaagcaatttgatgaaaataatccaaatacctatcaaaaaccagttattgataaatcaaaaatattaagttaaaatgcaatttctttgcattttgtcttttgcaaccaatagtttacactttcaaagtagagttggtagtcgcaacctaagtctttttcatataatgagagtgtcttagggaggtatgacaatgaaaaaatataaagatttatggttagaaaaaaattatataaaagtcatgttggctaatatcattacacgtttaggtgatggcattgatacaattgctttttcttggttagtttatgaagtgactggttcaactgttttaaccgcaagtatttttggtgttaatgtgattcctaatttaactattggtttggtttcaggagtgatttgtcagtatgtaagtgaaaaactgatgatgtttatttgtgatttaggtcgtgctctttgtgtctttttgatagcatttttatatatgagtggtcatttagctgtttggcatttgtttgtgattacatttttaaacagtagttttgaagcttttagaacacctgttgaagcaagtatttatcctaaaattctttcaaaagatcatttagatttagggattgctttaaaagaaagttttgtgaatggggcgaattttttaggcattattattgctcctatatgtattacgatttggggattacatggagctttaatcattgatgctttgagttttgcattatgtggattgattattttaacaatgcagaatattcatgtgactacagaggataaaatgactttatcaaaatgtttccaagatttaaaagatggttttgcttatgttaaaaaagatagatttttagttaagttattaattattttctgtttgactaatgctttatttaccccaattaattcctttgaagcagcttttgtaaaagatatcttacacatgggaagtattggtatatccttattttcaatgggatttttactaggtaatgtcctcttttcaccaatattacctttcttaaaggaaaaattcttaggtcgaaagttaattgtttatggaacgatggttgttggtataacaatgattggatattctttattgcctaatgttcctagtgaattccgatatatagctcttactttagtagccttttttatgggtggagcgattggaaccctcaactatcctgttcatttagctttatataaacgcattgaaccaacttatctttcccgtgttcaatcaatttgtggaacttgtgcaatggcaattgtcccaatcagttcttttttagccggtggtatttctgcctttgttccccttcaaatgatttatttaagttgtgcaattctcttatttatttgtagtatttatattttctttcaaaaattattttatgtctttaatcaatactaaaaaatactagaatgatatctagtatttttttaaatccgttaaattttctccattgctgttaataacttgttgataccaatcaaaagatttctttttctttctttgtaatgttccatgaccttcattatccttatcaacatagataaaaccataacgttttttcatttctccagttcctgcactgacaatatcaatacatccccaaggtgtatatcccattaaatcaacaccatcaatatcaactgctgccttcatggcttctatatgggctcttaaataatcaatacgatattgatcattaatgctaccatcttcttctaattgatcaattgctccaaatccattttctacaataaacataggtaattgataatgatcataaaaccaattaagtgaataacgtaaaccaataggatcaatttgccaaccccaatcacttgcttcaacatattgattcttaattaaatctttcttataatcaaattcaaattcgggatttgttccactataatgtgttgcaaaagacatataataagaaaaaccaatataatccacagttccttgttttaattcttgcaaatcctcatcagtcatatcaagatgataaccttttctttcaaagaatttcatcatatatgaaggataatatcctcttacatgaacatcagtaaaccaaaaatatttatgcatagcatcaacagacatcatcatatctttaggatcacagctataaggataaactggtgtcattgcgatcatacaaccaatttgaaattgtggattgatacaatgccctagttgaacagccttggcactcgctaccaattcataatgagcagcttgatacataagagcttctctatcttcaccttcttgataaattaatcctgaattagtaaatggctcaaagtcatcttggcacttggcttgattattaatctcattaaaagtcatccaatatttaaccttatctttatatcttctaaagcaaacttcagcaaatctcacaaagaaatcaatgcattgacgatttctaaaaccaccatagtttttcactaaagcataaggcatttcaaaatgtgataaagtaaccactggttcaattccatattttaaacattcatcaaataaatcatcataaaattttaatccttcttcatttggttcttcctcatcaccattaggaaaaatacgtgtccatgcgatagatgttctaaaacatttaaatcccattttggcaaatagtgcaatatcttctttatagtgtccataaaaatcaatagcttcatgattaggataattctctccaggtaaaacaccatcagtgatacgacgcgctacaccatttgctccagcagtcatcacatctgcaatacttacaccctttccacctttattccaaccaccttcagcttgatgtgcagcaattgctccaccccataaaaaatcttttctaaaacccataatctcatcctccttgacattatcataatgaatatttttattcagacaataaaaaaaactttgatagaatgaactaatcaaagtctttttcattttataatgatttttaaataatctagtctcttgatattaaaataccatagattaaatcaacaatatatcctgcagcaatcgttgaacacatcacatcaacatcatcataaatatgtgtatcaaacaataaacaatcctgacaatattcatttagtttttcatcttttcttcccataataccaacagtataagcatttttatcttttaatttttgagcaatatttaaaattgtttcattacttcctgtaagtgaaattaagatagaaacatttcttttgatatctttcatattttctaaataataatgattggttccattatgatcactggcatgcattcctaatgcctgtaatttaaatgccatacttttagcaattgtataagaaattccaaccccataaatatcaatggatgtagcattcattaatcgattacaaactcttaatacaacattttgattcattaaaagattggtatttgttaatgttttttcatataacttcataatcgtattcattgtcgaatcatacgatgagaaatattgactaggattatcatcaacaagattttcagcttttaaagcttctcttttttcaatgactaatttagaaataaattctcgataagttgaaatccctaattttttatataaacgtacgactgctgattgagaggcaaaacttctttttcctacttctatacttgttaaattctctatttgattattttcatctaacaagaaatgagcaattaatctttctgattcagttaattgactttcatcttttaatttctctataatcatatcatttcctcctcaagcattatataataatttatccaaaaaacaaagatgaaaaatatgtagaaaaaagatatcataaaatatgataccttcactataacattgcactttctgattgtttattttgatatttttcataggcaatgacaaatggaatataaataagggttgaagctacaatgacaattaattgtgaaactgctcccataatacttccacctgttgctaagaatcctaacaataaaggtggcattgtccatggaacttccaaaacaacacgtggacagaatccaattgttgttaaaaaccaaccaattgttaatccaacagctggaacaatcaagaatggaatccctaaaattggatttaataccattggtaaaccaaaagtaattgtttcattgatattaaataatccaggaacaagtgataatgaagcaattgctttattatcttcacgtttagcaaacatccccatggcgattaaaagacctaaagtcactccagaaccaccaatttcaccaaacatttgtaacattgttgtattgaaaatatgtggtattttcccactatgtgttgcatatgcagttgtattagcataaagcattggtctaaagattgattctttaaccgctgaaatcatattttgaccatggattccaactaaccaaaacatttgagctaatgtatacattaaacatacagctaaaatattgtctccaataattttagttaatggttcttgcaccgctgttttaataatgtcattaatatattgaccagttattaattgtacaagccatccaatcattccaacaactaataatgttaaaaatgttggaatcaagacttcaaaagcacgtgtaactcctggtggaacttgttcaggcatcttgatttttaaagcatccattttacgaaaagcatgataaatctctaatgctaaaattccaataattaaagctgtaaataaaccagttgcccctaaataatcagcattaaaaccagtaaaagtccctacttgagataaatcagtcacaccatttttagttaaaacatcacctatcgaaatagctttatcagcttgattagttaacccactagctagtgatgtgatggtatgcgcagttggtgtcacaaccgcccatgacataaacccaacaactgctggaaatgctcctgtttccccatttgcttcccctatttcttgagcaactaacataacaattccaactgaaatacatgagattgtacaaaattgaatggcagaaaaaactgcattaacaggttctaataccataattggactaaagattccccctaatccttgagcattcccttctaccaatgtatcattaaccaatacatttgtccaaagtacactcatcgctccagcaattgtagctggcataaagttttgaaacgcatttttaatagcacctaagtatttattctgtccagcccaagcgccaatacgtccaagcttatcagcaaaaacatccattttcttttcctccttatctagacactattataaagtgtgtagaaaaagaaacaataaatctaaaagctgttggtttgtttatttaaaatatataaaaatgtgattttaaaaataaattttttatttaagaaaagagtgaatctctcttttaagactcactctctatctcatattctggtaaccaattgactttatgataataaacaataaacataattgcacatgtcacccaagtcactggccatcccataaaaacaaaataaatactagacgtcaactttgtcacaattgccaaataaatttgtcttaaaataacaaagttaaaaaccataatatacattggaacagatgatttaccagctcctcttaaaaccccattgtaaatttggacaactggtaaaacaatatagaatggtacaaaggccatttgcattgttcgtccagcattgacaacatcaatttcactattaaaaatagcaataaactctttaccaaagaagaataaagaaatagccatcgtacctataactgccattgtcatccataatgcaatttttgatccacgtttcacacgatcatattgcttggctccaatattttgaccaacaaaggttgtaattgccatattgaaactttgtaatggtaaattgacaaaaccatcaattctaatagaagcagagtatcctgcaacgacacttgaaccaaacgcattaacatatgattgcacaataacattagataaagaaacaatactttgttgaagtcctgttggcaaaccaatcataacaatcttttttaaaattggtatatcaaaacggatattctttaaattcaaacgatgagccccatcacttttcattaatacgagcacaaccattaaactgcttattgcctgggcaatgagagttgcatatcccgctccagcaacacctaaatgtaaatatttgacaaataaaaaatctaaaataatattaatgatacatgctatgattaaaaaatacaaaggctgcttggaatctccaatggcacgtaaaattcctgaacccatattataaattaagttaaaggatataccagcaaaataaattgctaaatatgttgaagattcttgaaaaacatcagcaggtattcctactgcatgtaacattggatttgttcctaatattccaacaattgttaaaacaattgacatgacaatcgtcaaagcagctgaactatgaacagctttctttaatcgtttatcatcacctgcaccaaaatattgagcaataataaccccagcacccgttgctaatcccataaaaaagccaatcagcatattaataattggtgaagaagctcctactgcagctaaagcttgtttacttacatagtttccaacaacataggcatccactgtgttataaagttgttgaaacaagtttcccactaaaagaggtattgaaaaccaaaagattgattttgcgatacttccatgtattaaatcagtagattgattcttatccatacaaaatccccctttatgtttctttattttacaatatttttacataaaagaaaggataatttcatggtgtgaaaataattttattttttcttatttttctatataataaagacgtggaggatgagtatgagtaagaaaattatattttttgatgttgatggaacattggttgatgtgagaccagctagagagtatattcctgaatcaacagtaaaagcagttcaagaaacgagaaaacaaggaaatttatgttttttatgtacagggagaagtaaagcagaaatttattcacatattttagaagttggttttgatggtattattggagctggtggtggatttgttgaaatagatgatgagatgttatatcataaaatggtttctcaatctgctattaatcatgttgttgatttttttgaagaacatggttttgattattacattgaaagtaatggtggtctatatgcgagtcaaaatttagttcctcgcctagaaagaattatgtatggtgatttagaaaatgatccccttgctagaaaaaagaaagaagaagaaccaagtcactttattccttctttaaaagttggatatgatttacatcgtggtgatgttaataagatttgtttcttagaaaaagaaggatttgcatttgaaacaattagaaatgaatttgaaaaagagtttaatgtgattcattgtacagtacctatttttggtgacaatagtggtgaactttctgttcctggtgttaataaagcctcagcgattgaagctctcattacacatttaggcatcccaaaagaaaatacatatgcttttggcgatggtttaaatgatattgatatgttagaatattgccaacatggtattgctgttggaaatgcagccaagggacttaaagatattgctgatgaaataacagatgatattgctgaagatggtatttatcattctatgaagaaacatggtttaatataaatagacaagatagagatttctatcttgtctatttttgtaattctgataatttgatatcatcaatataaatatattgaatattatccttttttatcatttttaagaggtcatttttattgacaattattcttaaaccagaaacctgaaaaccatttttagcacatttatatgtttcttttaatgaagaataatccatagaattacttgcttttgaaatcatattatattctttttcatgatctaataacatttttaaattcgataaataatattgtcgtaatatatctggtgttatagaattattgttttctatatagaaatgaggatattttcttttagcatcttcagttaaatcatacatacttaatttatataaacttattcctcttgcaagtgttggatcatcttgactccataaatcagttgccatccaaagaaatttaacttgatcatatcgtttcataaaatcaattgttttttctaatgaataaggtttatcaaaactaattgaaacatttaataatgatgattctggcagcttttctatttcatttaaagttttatcattaattttaaataaatctttgccatacacatcattttcagataaagataagttcaaaaactcataggacattctagaaaaataatgttcaccattaaaatcttctatagacatttttgattggttgatatttattattgcattataagaatcatctacatacaatttatcaaataaattatgaaattttacttttaattcatagtttcctaatcccaaagattgtatatcatggtttggataatatccataatttggacaataaatttcacaccaagtttgtaaaacaattttaaaagtttttccagagaatctttcactttgctcatctacaataagattttcttcatgaaaaggattgtaatatatataatctgatatatattgatatcctttggctatagtaacaattacaagtgtgataataattgtaaagatgataattcttgaataaatttttttatgaattatcttttttatttttttatttgttccttcatcatctaattttaataattcatctaattgatcttttttcataaataaccctcctctatacatagttttcttaatttttctttaacacgatgacgaatcactcgcatataattcacactaatatttaatatttgtgaaatctcaacatcacttaaatcatcttgaacagataataaaatgacttctctttctattttaggtaattgatagatatttttatataaccatcttttatgttcctcatgaatgcactcttttaaaacatcatcagaactttgaaaacaatcaaaatgaatttcagtttgagtatatacatatttctttttctttgtcatattatagaattcattttttaaaacagtatataaccaagcttttagatttccatcttcaaagcttaataatgctttaacaaaagtattcatcactaaatcttctgcatctgctttttgatgagtaagagaaaaggcaaaaaggaacagagaatagtaatatttttgataaagcaaatcaatttcatcttttttcacatttctccccctccctcatctatataacaatcatatcacataataattacataatatcttaaaaataaaaatgagatagctattttaaccatctcatttcaatatgacttacgataaaacatttatcagttcttcttcacttttcgcatcaataatcttgattgttaaagcatctattttgtcatctgaactttcttctatcttcataatcagttcctttgatacaaatccaaatttgctttttattacatttacaatggtttggattttcccttgtttaagtcctctcatttcactttctgatttaaattcctctaatacctgacacatgtctacttcctccctttcttctttctctatccttatgactagttcttcactatttatcaccatagttacttctttttataagttcatatttacttataaatataagaaaatgataaagcaaaaataattagctagaactatttttgctttattcctaacctataattatttatgacaatactttcatcagttcttcttcacttcttgcatcaataatcttgattgttaaagcatctatcttatcatctgaactttcttctatcttcataatcaattcctttgatacaaatccaaatttgctttttattacatttacaatggtttggatcttcccttgtttcaatccaagactacgacctctttcaagtcctctcatttcactttctaatttaaattcctctagtacctgacacatgtctacttcctccctttcttctttctctatccttatgactagttcttcactgtttgtcatgactgctacgactatcgcaacctctttgcttaacaccagttccttgatagtgctcgtatccttgttccatctatagattgtctgaactgcactgaccagtgatttcaccttctcatttctgagcaactctacattgatatccttgatatcacggatattccctttccaggtgttcaccagtcccttcagcggttctggaaccagaatacgatccaggagtgaatggggttgatgccatgtcctgtctccactatacagaactgtactcatgactcccgtaggtctgaaatgctccctatggtccctatcaatcagcttgtactgcaaatgataggtcattgtatcatagagaagcagcctataaggcatggaatagttaatcgttgactgaatctcaagtccgatgtaaacaggaatcccattgattgttgcatgcatcaatatatcacgccgtctttccatgacattgattctattctcatagacaaaataaattgtttcatcactatcgcatagaagcagctcatttgcatggatgacatctttcccttcaaaaagcatggcattgatgatatcggcaaaatgagtcttgaccttaaagaatcctcttaaaatcttatcctgtttggactgttgttttggttcttgatatgtaagcgtatttatcatatagattttcctcctttttatagttgagaaattctaaggaaatataacccctatacttatatatacgcttgcaaagtctcatttttcttctttttaaggcaaaaaagttgaaaaagttttttgattcactcctattatagcacaaagcaaacattaatcaattgcttaaagcaaaaaaggtttacttttgtagtaaacctttattcattcactagatatgatgatattgcataaacaatttgaccattatattctaattttgaccaaccattactatgaatacctatgcgtttaacatattctccattttttaatgtataaacaactttagaagtatcaactgatggcttatcacgtaaatttgtttctgattttgctgtcactttttcattgacagtcgtaaaaccatcatcttgtgttggttcatcttgttgtggtttttgaataacttcatttgaaaggtaacttgtaatagcataaacaacttgtcctttatattgaagtcttgaccaaccattttgactaattgcaactctttcaagaaaatcaccactattcaatgttcctacaactttacctgatgttgatggagaatcacgtaaattaacttgatccttagcagttactttgtcttttttagcttcaaacttttgcccattaacaatatcttctttttcttcttgtttcactgataaatcagttgttaaataactcgttattgcatagactgtcttatttttataacgaagtttagaccatccatttgagccaataccaatacgtgtaacagtttcaccatttttcaaagttgttacaatattactttttgttgtagcgagtgttcttaaatttgtttcacttttagctgttactttctcattgacagatgaataaattttatcttgatctgttaatggaacagaagctttaggtacatcagcatttttatttttaggctgtgcttttttgttttcaaaataacaaacaaccatatctacattaccttcaataccattaacttgacctttatttgtatattgccaggcatcacattgtccactataatcaggttttgctttttgtggatatatctttgttgaatattgagcaatccatattttatgtttgccttgaatatctttcatattccaatgtgtttcaatatcacttaaagaagtataaaacattgtttcataacctgcttttgaaattgtatttaagaatgatagagcatttgcagtacgttctttaacgcctaatttatatgtacgactagaagcatgtttataaccttcacaatcataaacaacaggataggaaatgctatatccttcaatacattttaatgtccattttgcttcttcaatagcttctttttgattgatggctgtagaataaaaatacacaccaaccaatattcccgctttttgagcttgttgaatattataatcagcattatcatctttataaataacaccattttcaccacgataaccaattctaatataagcaaaatcaatttgacttttcttaactttattccaatctatttttccttgccatttagaaatatctattccattactttttccttgctgaacatttaattgactagaattaatacttgtcccttcttcttgttcatcaatattctctggatcaatagacgcatcacctacttgatttgtttcaatgatttgagaattatcttttttatcactcgtattatcctcatgacttatacttttataaaaaaagaaaatccctacagcaacaaaaacaatcaccactccaacaattattatccattttcttttttgattcacattatacacatgattcccctcctctttgttattataacttataatcatacaaaaaagaagatataacaaacgactcattgtcagttttaagaataaaagaaattatttaaatgaataatggagcattactgctccactactcactccaaaaatattttcttgtctttaatattcttctcttttcttaaccaatactacacctgtagctaaaactgttataattattgttccaatataaaatgctattgtcgtattgtcatttgtttctacattattatttgatacatctgggtttattggtactacaggattaacattaatatcaggaatttctttctttgttaaagtagctattgctttttcaattgcatcggccattgcatcaacttctttttgtttagttatatttaaatctttttctacagcattgattgcttgatctaagatttttaaactatcttcggtataaagatttctattgatatcattagcctttttaatagccatttcaacttgactatagtcagcactcttatactgcaatttattaagagctttttcaattgtgttagccattatattgacttcttcttgtttagtaatatttaaattcttttctacagcattgattgcttgatctaagatttttaaactatctttagtatatagatttctattgatatcattagcctttttaatagccatttcaacttgactatagtcagcactcttatattgcaattcattaagagctttttcaatcaaaactacatatccatccacaacttcttgttcataaatctttttatttctaacaacttcatcaatagcttgatctaattttgataagcttgtttgagtatattgttctctatttaattgattagcctttgcaataacttcatcaaccattgtataatcagcttctttaataacttctttaccatatactctcaattgattgagatggaaagatgcattagctgaatcatattttcctataagcttaacatatctagcatatgtttcttgatgactgatatcaatattttcaccaaaaatagttgatttttctgttccttctgtttttgaataaagaagttcatattcttctccatcaatacttgtataaatatcataataataatatctatcatttctagcccaataagtaattacgtttaatttatctaataaataaacatcttgtaaatctactataatccatggattcttagaatatactccagcatcccaataagtttgacgatttccatcaacgacttgtatatttttactattagaagaagatgaagcactattatctgttgaactagatgttactggttttaaataagcaagattatttttttcttgaccaaacacttctaattcaacaatatgaatattattaatatctggtctaccaacaaccattgttttaattcctttaagtttaatataggaaaagcttttatctgtatttatttcatgattaaatccattttgggttgcataattctcagatatattttcaccaattttaacccatgatattttatcatcactaccatacagctcatattgataaattctttgtccaccccaatatggataaacaactatatgttcaagattatacactccatccaaatctataataaattcagcatctttactagctacattaccattattttcacttgcccaataattgcttgtattctttacaccatcattaattttatatgcatttttttgattacaattagcgtcaacattcattttatatgcaatatttactaatttcactaattcattaactgctttgtttaattgttgataagcaagatcaatttcttcttttgatgcactattccctaaatttaagatttcttttgatttttgaatagcattaattaaagcatttacagattcctttgtataaatgcctaattccattttttctatttctgttacataatctttaagataggtattatcacatacctctttacttatctcacttaattgaaaatcagttacaatttcaatcccattttctttataagataaagtaattatttgttctggaccttttgtagggtcaaaatgagtcacttttattaaatgactaacatcacgtgaaaaatgagagttatattgtgcctcaacttttaattttaaatctttattagcaacatatggtgattcttgagaaataatcaaaccatttagttttgagagttctaattttcccgcagcacttacgcctgcaacagaagataccccacttgcttggagtgatatagattcataaccacttgaaccagtaatgcaaccagcattagatatcatttgtaagggtttatttcctgcttcgtatgctgacaaaagacattgagtaaagaaaataactgaaccacgtggtacatgataatcacttgttaccattgcaagtgattttacttgtgggtagtttgtattcaaaatcttatatgtgttttttgcatttcctaccgtatcaggtgctttattttcaactattaaacgtttttcatcaagtccatgatctagcaaccattgtcccattaatccgccttctgtaacatttggattatttgctgcagtacctcctccagtcacagcaatatatgaatttggatattttttcgcactatccaatccaacttgtaatctattaatcaattcttgtttcatagttccgtcagagtttaatgcaaaccctaaaacaataatacatagactatcatcattaggtaatccatctggaagtacacctgtatttacaaaatttttttgatttacttcattccagaaatccataatttgtttccatgattcatactttgtttcatcaatttttttaatttcctcaagcgttcttataatatctgtctttgcatcattttgataatctcgataatatgcaatcaactcactaatataagaatttacatccttagaatcagcagcatataccctcattggagcaacgatattcataataaataatactgatatcaaaaaacatattaacctcttaaaaaatttcatccttccttttctcctttttcattatttaataaaccaacaatacccatcattatcttcattaaataatttcaccctcctcttttataataaattaatttggcatcgtatggcattattatcaaaacacaaaaaatcacattcttattacacatctttatataattataatgtcataacttatttatttcaaggaaaaaggatgattcttaacaatctattgaatctctttaattccagcaatcagtgactttcgaatgactttatagttagattggcctttttttataacttcaaccataacccaatcatcatcaacatctttaataactccctgaattgaattatcatcagccacataaataagccattgcttaaaatcaatttcacacatcttaccaatcatttcaggtaaaatatcctcaacaatatgtttatcattctttggcttcttttcattttcccgatcataaataatataaaccaacattccaataacaacaatcaataaaaactcactcatcattttcacccacaatctcaaaaccattaatatcatttaaatcaatcagcttaatcacatattccttctttaaagaaattccttttctcctttgatatttcacctttagccattgttcattaacatctaacacaagaaattgatcctttgatggtgaatctaaatataaggaagattctttacaatcaatcttacatatcttacctattaaaccataaagaatatgtgtatctttttgttttgaactaatgacttctacctcattttccgttaaatcatctaagctcacatgataaagctttgccaattctttggccttatcaatcgttggtgctccttgatttaattcccaatttgatattgtttgacgactgacatttaataaatctgcaacagcctgttgactcagtccatgtttttttcttaatttcattaaattttctccaagcataaatatcaccccttctatcaattattgtatcgataataacactttttgactagcaaaatcatttggaaattttgctaatttctttaacaaaagaagtttaccagtctataactagtaaacttcttcttgatattcaacaacacgatcatcttgataaacaattttagcactatgaaaatcattatcttcaatccactcaaagaaatgataatctccttcccacattggaagcttatcaatatcttgatcatcaatccatttcaagacaccttcatcacattcatgtaattcaccactaaaatcctcacaagtaaaaataaacatgccttcatcttctccatagtataatcctggaaatgaaacaaatccatgtaacttcaaagaatgagcagtcagtccagtttcttcaaagatttctcttttcatacactcttgaggactttcaccagcttcaaactttcccccaacaccaatccattttccttcattaatatctttttgctttttgatacgatgaagtaataacgtttgatgattacgttttaaataacacattgttgttaaaatcatattaacgatagatataataatcaggtgatgaacctgttatgatatctacattcacttccttttctaacaactctttaagttttgtaactataatattttctacatgatgattgatatcaactaaaacaataccatgatcaaccgcatttttcgcatgacgatatttactatctccagttaaataagcatcaacttgaccatagaattgatcaataaaatcagccccactaccaccacatattgcgactttttcaattttatcaacatatccagcatatttaaaatgttctaaatgataaacacgttgaacatgattgataaattcatcaaaactcattggttgatttaaagtagccatacgtgttatcccactttcatcacctatctcaatatcatgaacacctaaagcttcaatcaaccattgattcattgaaacattatctaaagctgtatgtgaactataaacaacaatatgattttcaattgctttataaataaattgtcccataaaatcatctttatcaatattaatgataggatctaataagaaaggatgatgggtaattaacatttgacaaccattttcaatagcttcatctagtgttgcattgtcagcattgagtgatatcatgattttattcacatatgtatgtatatcgcctatttgtaaaccacatttatcccattcttcttgtaatgataaaggataatgtttttccattatttcaataatatctttagcttgcattaatttcaccttctatcaactctatcatgtgtttcacttcaattgctcgtggatgattttcatccaatgattttaatatatttttttgtatttctaattgtcgataccatttttcataaaataaaccatttttattttttcttaaacatggtccaaaataaaagtctttttcatcatattcctgtttttcacttgttttttcacaaacaataatctcataaatatgattcgcatctttcacaattccctcatcaagaataaccatgttttgatttgttaaatattcacgtaaaatttctagtccaacattggattgaagaataaaacgatgatgatccaaaaactccttgttttcatctaaaatatctacagttaactttccacccataccacatatactaatcatatcaatatttttatcaataatagggttcataccacttcctagaagtggtatgacttgtttttctaattgatgtaattgtattgtttctattgatgcgttaataggtccacttgcgatatcacatgcatacgctttttctatcacaccttcttctaccaaatacactggtaaataagcatgatcagttcctatatcggcaagtatttccccttgtttatattttgtgattaaatcagcaatagcctgtaatctttttgatagtttcatattaacgatctaagaaatcctttaaacgttttgaacgtgatggatgttttaactttcttaaagcttttgcttcaatttgacgaatacgttcacgtgttacgttaaattcttttccaacttcttcaagagttcttgtacgtccatcatctaaaccaaatcttaatcgtaaaactttttcttcacggtctgttaattctaataaaacttcatttaattcatcttttaataattcatttgcagcataatcatcaggtgacatagctccttcatcttcaatgaaatctcctaaatgagaatcatcttcttcaccaataggtgtttctaatgaaactggttctaatgaaattttttgaatttcacgtactttttcaggtgtcataccatccattttttcagaaatttcttctgctgaaggttctctccctaattcttgaatcaattgtctttgaacacgtgttaacttattaatcgtttcaaccatatgaacaggaatacgaattgttcttgcttgatcggcaattgcacgtgtaatagcttgacgaatccaccatgttgcatatgtagagaatttaaatccttttgtataatcaaacttttcaacagctttgattaaccccatatttccttcttgaattaaatccaagaacaacattcctctaccaacatatcttttagcaatagagacaaccaaacgtaagttggcagctgccaatttcttttttgcttcctcatcaccaacaaggattctctttgccaaatcaatttcttcatcatgacttaataattcaacacgaccaatttcttttaaatacatcttaacaggatcattgattttaacattgcttcctaattgattatcatcgtcatcatcatgatcactatataaagtcgctgtatcgcttgtcatcatgtcaaaatcaccaacgaaatctaaatctggaacatcgccaccaagatcaacgtctaaaccttctaaatcctctaaatcttctagtccttctaatgattctaaaccttctaaatcatcaagatctcctgcgactccttttaatagctcctcatcatcaatttcaagagcatctaatccatcttcaatcacaatatgactatcagtaataaattctaataattcttcagctgattcatcatctagatcatactttgttaaaaaagcatctaaatcatcttgagataaagttccacctaaagcatcagctgtttccttaattaaattctttaaatcttcaaatgtgactggtgctgcttttttctttgtttcttttttcataatgactccttttcattctctaacttcacaatttcacttaaaatctgagctttctgactcggatctaatatataattaaactgttctaataactgttccttcttcatttttctagcattcgctgcaattgttttaatataatcatcaattgctttttcctcatactgtattggtagcttcgcttgcgatatttccactacagtttggattaattcttccttatgtataccattaattaaatcagccacttctaaatgattatgatgacgataatagtcaacaatataagaagcaataatacgatactgatcattatacataaaacctgcttttgcttcatactttaaagtaacatctttactatttagcatataaaacaataaatcatgttccgccttattgtatttatcaataatttgaattgtttttttaacttctcgatgaacatattcttcttcagctctaggcttcataccagcaactcgctgttgaatgatatcataagaaaaacctgatttttgtgacaaaacatgcatataataatcacgatcaatatcatctttaatctgtgtgatttcaaaacacattttttctaagtaatttttacgatcatcgtaatttaaagaatcaaccagctggtattcaaaatccatcaaaaactcaatcggtttcatcgttttacgtaacgcttcttcaagtcctgattgcccatgttcttcataaatttcatcagggtcatgaccatcaggtaaaataataatttgaaccttaaagccagcttcttccaactctctagctgctttactcattgccacttgtccagcatgatcaccatctaaacaaagataaatatgatttgttaaacgacgtaatgcttgaatatgtccttttgttaaggctgtacccataatagcaacagtattttcaatacctgctttatacatcgcaataacatccataaaaccttctaacaaataaacaaatccagcttttttcacagcttcgcgacattgatgataatgataaagcgtttgtcctttaataaagatatctgactctggcgagttcatatacttactatcagtttgcgtcggtttataaatacgtccactaaaaccaacaacttgcccctgctgattaaataaaggaaacataatacgatcattgaaacgatcaaaatgattattcgattcaatcacaagaccagatttcaccatatctatttcactatattctagcttagtaaaggcagtatgcaaaacaggatcaattggtgcataaccaatttgaaattctttgattaattcatcagtaaaatgacgatttaatagataagtcttagcttctaatccaagttttgtatttaaataataactataaatcttctgtgcttcttggtgcatttgataaagtgcaacatgttctttcttttctggtcttttttcgacttctagatgatattcacttaaatcaatatgccccatttcggcaacttttttcacagcttcaatgtatgatatcttcaagtattcttgtaagaaggtaaaaacattacctcctgtatgacaaacaaaacacatgaaaatctgtttgtctggcgatactgacattgaaggatttttatcatcatgaaaaggacataaggctttatagtttcttccactcttttccaagggaagatattccccaataacatcaacgatatcaacactttgtctaatttcattgattttttcttgtgaaagtcgtgccatatatgtcctccttcaactaaaatttaactttttctccaatataatgaactaattcatcaattggtaaacgaatttgttccattgtatcacgatcacgaagggttactgattgatctgtatctgtatcaaaatcaatagtaatacaataaggtgtcccaatggcatcttgacgacgataacgttttccaatttgtccagcaacatcaaattctacattaaattccttagcaagcatgctataaacttccatagctttatcactttgttttttcgttaatggtaaaatcgctgctttcactggcgcaactgctggatgcaaatgcatcactaaacgtgtatcattttctaattgttcttcatcatatgcatccgctaagatagctaagaacaaacgatcagctcctacagatggttcaattacatatggaatatatttttgatttgtttcaggatcaagatattctaagctctttttagaatattgttgatgtcttgataaatcataatcagtacgatcagcaataccccataattcaccccaacctaaaggtgcaggatataaatattcaatatcacttgttgctttagaatagaaagataattcctctaatgcatgatctctaaaatgtaaattatctttagttaatcctaaatctagtaagaattgcatacatccttctttccaataactaaaccattctaaatcagtatctggtttacagaagaattccaattccatttgttcaaattctcttgttctaaagatgaagttaccaggagtaatttcatttctaaaagatttcccaatttgaccaattccaaaaggaactttcttacgagatgttctttgaatatttttaaaattcacaaaaattccttgagcagtttcaggacgtaaataaatatcattcttagcatccttaacaactcccattgatgttttaaacatcaattcaaattcacgaatatcagtaaaatcttcttctccacaatctggacattgaatatgattttctctaatatatttcatcatttcttcaggttcccaaccttcacaatgaacattaggatcgaaatcttcaatcaatttatcaacacgatgacgtgtatgacaatgtttacattctgtcaatggatcactaaatccacctacatgtccacttgcttcccaaacacgaggattcataaatatagcagaatccaatccgacattataaggtgattcttgaataaatcttttccaccataatcttttaatattgtttttcatttcaacacctaatggaccataatcccaagtgtttgctaaaccgttataaatttcagaaccttgatatacaaaacctgaactttttgcatgtgcaattaatttttccatatctttgtttgccatatttatacccctttaatttgatttttagtcttactaaataatgaaagactcagcatgagctaagtcaatattacccttatcataagatatatcgttatagttataccctcatagtggttatttgtcaaccaactataagggtatcctataaatacgttctttcatttaaccaatgcaaaatatctaaataaacttcgtttctgccttgttcaaataacaaggcatgtcttttttgagcaaagatttttaaagtcaaatctctaatcggaatacttttatatttattaactaatttttcaatattacgacacattggatcatattcaccaataccaatataaattgataaatattcaggaatcttagaaatagattcatttgtattgacttcttccatcgctttaataatatcgcgatatccctgaacagtataagtaaaatgtgtcattggatcttccaagaatttttctttttcttgttcatcacttgttaaccaatcaatttcactatcagaattatcaatacgacgattatgcaaacgatggaatgagtgaaaataactagttgctttataaagcgatcctttcaacgtttttaacaaacgtaaataagctcttttaatatatctatattccactttagccggtgtccctaacaacaaaacaccttcaataaaatcaccatactcacttacatacttacgaatcaagactgaacccaaatcagttcctaacataaaataaggaacatcaggataattgcgacgcataatttgttgcaaatggtgcatatctttgactaaattttctgggccatcatgttcaccaaaataaccctgttcaaaatcaatcagagacgttccatgcccagcaaaatcacttactaccacaacaaatccttgacccaataaataagaagcaaaatgatcataattatcggcatgttcgcctagtccatgatgtatttgaacaatacctttcacacgcaaaacaactttcggctcgtagacataataacgcacatggacatgcatacaagatacataagttgcactacgtttcataactatgacctcctttttaagggacgatattgtcctttgggtttaatcaatgattttttatcaaaaccaattaagtcttgtctttttgcttgaattaatgcttcatagacaagatgataattttttggattgcgatattgcatcaaagcacgttgcatcgccttttcttttggtgtttttgcaacatagactggtgacatatcacgtggatctaaaccagtataatacattgctgtagaaagggttccaggagttggatagaaatcttgaacttgttctggctgatgatgaatatctcttaaatattcagccaattcaatagcactatttaagtcacttccaggatgagaggacattaaatatggaacaaggaattgattcatccccatttctttatttaaacgttggtatttatcaacaaatttctcatataattgacgatgaggttttcccatcttatctaaaacttgatcactaatatgctctggagctactttcaattgtccactaatatgatttttaaccaattctttaaagaaagtatcatcttgatcatacatcaaataatcatatcgaattcccgatcttacaaatacctttttcacgccatccaacgctcttaacttctttaataaagacaaataatcgctatgatccacttttaaattacgacaaggctgtggccataaacattgtttggatggacacgctccatgtgttgcttgtttatcacaactaggttgacggaaatttgctgttggtcccccaacatcatgaatatatcctttaaaatcaggatcttgaatcatcactttagcttcatcaattaacgattcatgagaacgagtttgaataatacgtccttgatgaaaattaagcgcacagaaattacatgccccaaaacatccacgattactaattaaagaaaaacgaacttcttcaatagctggtatataatcatacattggatgataggttctttgatatggcaaagcatatgtatcatcaaattcgatttgtgttaatggacgatttggtcgattttgaacaatgtagaaaccattatatggttcaactaatgtcttggcattaaaatgatcagtattttgatattgaattccaaaggatttcgcatattctttcttgcttttgataattgcttcaaaagatggtaacataatataatcgtctggaattatcgataaatcctttgtcttaaaaactgttccatctaaataagttaaatattttgcttcaattcccgcatcaagtgcttcagcaatctcaacaatactattttcacccatcccatacatcaataaatcagcatcagcatcaactaaaatagattttctcaccttatcatcccaataatcataatgtcctaatcgtcttaaacttgcttcaattccaccaattaaaatagttgcatctttatacgcttcacgaaccttttgactataaacaataactgcacgatctggtcgatgattcatttcaccattatttgaataactatcctttttgcgacgacgttttgaaacactataatgattgaccattgaatcaatattaccactagaaatcaaaaatccaagtctaggtttcccaaatcttttaaaatcatctaaatgatgccagtctggttgtgctaaaaaacagaccttaaaaccacgactttctaaagttcttgtaatgatagccgcaccaaatgaaggatgatcaacataagcatccccactaatatatacaaaatcaggttgttcccaacctctttctaacatttcttctcttgttgttggtaaaaattgtcccataatgcctccctttgatatgcacttattatacaccaaaatatgtgtaagcaaaataaaattgtgtagaaatctacacaatttgttgaataaatgtcgaagtttttaaaataactccagtatattcttcgataaactgttccattaaaggaatcaattgtcttatcacttcatttgataaatgtaattgatcaatatgttcaagaggaatcttatgaatatgacgaaaaccttttaaaactgctttatcaaagactgtatgatttgataaatgttcttcacatagaaaaccaccatcggttaaagaaatagagacaaccttaggtgaaccacaaatcacacatccatcaacatctaaagaaaccccattatgatcaagaataaaaacattaaataataaatagacaagcaaaggtggataaccttgatcaagcttctttaaagaatcatagagaatatcaaattccttttcaattggattattttcttcaatataacgataaaaatattccaatatataatttgccacaatctcactttccagattttcttcaatatgtcttaaataatccaaaggtgaagctttcatcaacacactcaaacctttttttaaatgaattgtgaattcacttaacatcatttgttgggttgctctggcatttttacttgtcatttttcttactcctctagcaatgattccaattttgccatattcacgagtataaacatgcaaaatcatatcattttccttataaggagttgtctttaaaatcaatccttctacaacgacttcattaatagtcgttttcatcatatccaaactccctgagatacttttgtttattacgccaatctttctccacttttacaaaaagttctaaatcaacactggtttgtaaaaaacgtttcatttctcgtctggcattttgtctaatctttttaatcatgctcccttgtttaccaataataatggctttttgactaggacgatcaacaacaatcgctgccataatatgaactccattgtcatcttcttccatcttttcaataacaatcgctacactatgtggaacttcttcatgggtaaaataaagaatcttttcacgaataaattctgccataatgaatctttcgggatgatcagtgatatggtctttaggataatacataaccccttcttctaaatcatttttaattgttgtgattaaatgatcaatattatctccttcaacagcactaattggaatgatttctttaaaatcaaataactctttccattcatttaatttttcaatcaattgatctttacttaataaatcaatcttatttaaaaccaaataaaccggtccatcagcttcttttaatctctcaacaataaaacgatcacccttaccaatcttttcatcagcaggagcaataaataaaaccaaatcaaccccataaatactattaagtgcatttgtattcataaatgaccctagaccatcttgaggtttatggataccaggcgtatccataaaaataatttgcgcttcatcatcagtataaataccttgaatggtattacgagttgtttgtgctgtagctgaggtaattgctagttttgtttgtaatatatgattcaataaagttgattttccaacatttggtcgaccaacaatactcacaaatcctgatttaaatgtcataagctttctcctgtaaatgcacgtggcaataattcatgcatatttgttacttcataatattctttgcagcctaaaataattggtgtatacggatcaagtaattcagctaaaacttgtcgacaagccccgcaaggagaaatcaaaggtgtacaatcaccaacaatggctagagcttcaatatcatctttacgatatcccttgcaataagcttgaaatacagcaattctttctgcacacatcgttgaaccataagcagcattttcaatatttgtaccatgaatcatttcaccattctttaataatagacatgctcccacacgaaatgaagaataaggcacataagcattgcgacttgcaataaatgcttcatctactaatttttgataatccatgatttaccttctttctatccctaattgatttaaaatctctttttgtaatcctgtcatttccttttcatctgcttcattcatatgatcataacctaataagtgaagtaagccatgagtaaacaagaaacacatttccctttttaatgaatgttcatattcttttgcttgaacaagtgcatgatcataagaaataaaaatatctcctaagcttctaggcatcccttcaacataaaattgatcactatcttctaatgcaaaactaataacatctgtagaacgatcaatttgacgataatcacgattgatttcgtgtatcttcttatcatcaataatcacacatgataattccacattatcttctattttcaaatgttttaatgttgtttcaataatctttaaaaattgttcttcataactttcttcacataaattgttttcatcttcatatacaaaatcaattgtcatcatatcattttcaccttctcatctttcctttcccattataacacaaccaacattcttgttcactaactttgtttgatgattcaccataatataaatctttccttcatcatttttcaacaaatacttcatgattttattagctaatgtactatccatatgagaaaaagcttcatctaatatcaacacatcatacgtttgacaaagcaaacgcaccaaagcaacaacctgtctttgtccaagtgataaaggtgaaccatcttcactcaacacaagatgaaacatctcaattaaatctttcattccaaaagctcttaaatactttttcactctcttttcatcttcacataagaaattatcaaataaactcatatgtaaaaaagttggtgtttcattaacatatcccaaatgttgatataaagattcaagttgaatatttcttagttcaattccattaatataaatatccccaccataatctaaatcaactcctagtaataatcttaataaagttgatttaccagaacctgtttttccttttattaaaagatgatgatcaatcgttaaatctaaatgttcaataattggtaattgatatccataggcataactcacattatctaaaacaatggaagtaatcggttgttcaatccattgcttttctacttctttttctaatagaaaagctttgtatttttcaaaaatcaaacttacttgtttatattgagcaagcattgtgaccatattcaatactggctgaatacaatatgaaacaagcatataaaacatcattaattgaccaattgtcatatgctgataatgaaaactataaaaacctagaataagaatgaaagtataaaagatataaatgatatattgaatatgaatctgtaattgattaaaccctaaagcttgtttttcttttaacaacgcttcatctaaataaatatgataacttctttctctttctttttgatgtaaacaaaatcgtttgatgagaaattgattctcaatcagttctaagacatgatgctgataaatgaaatgcgcttctaaataactttgattaactttttgtaaagctgataaatgacgataacttacccaagcaacaataactaacataacgataacaagtaaagtcatctgaacatttaaaaacaccattccaagtaaaaacactataaatgataatccatctaaaaataatctttcaaagaaagctaaactcatttcacttaaatcaaataaacttaataattgactttgaattgctcctttatcttgataaaaaaatgaatgaggttgttttaacatattcattgaagatgtaaagacataatcctcatctaaggctctttgaagatgaatggattctttattcttttgattttctagctttgttttgattatttcaataagcccataactcacacttaaaataatcatataaaagacatgtgtttgttgagcaatatcgtcaatcacaatttgaaagaaataactacttatgtaacctaataaagatatccatacgccttttaatatcaatgagatcatatgtttttgataagatttaaaagtatcttttaaaaagcttgaatagctttgataacttaattgtggaactctccccacatgtttaatcataatcaaacaattggcataatgttcttgcatttcttcaggataaagagttattaaaccccttgctgggtcacctacaatatattcctcattggctatttcaaacaaaacaacaaaatgtccaacaccctcataaatcatatacaaaatacatggtaatttgccttcattctttaaatcatctaatgagcagtgataggctatagcttctatttgataagcctttaagcattcaatcatgccctttatactaattccattttgatttaatcttgctttctttttgatttccttgatttcctcattgaagccataatattttaaaatcattaaaatacaataagctccacatgctttttcttcgtcttgtaattctacttgatatttgcgcatataaaaacccccttacttctatatacgcttcaagtaggggatttttctttttttattgacaactttttaaaactttttttaatttttcaataaattcatcaacatgttgcttttcaatgataaaaggtggtaacattctcaatacattttcacctgcagtcacaacaatcacaccttcatctaacaacgcctttactactggcttcacatcacttttaaagactagaccttgcatcaagccaagtccacgatacccttcaacttgatcaaattcatcaatcacttcttctaatctttcaatcaaatattcagaaatatcttgaacatgggcaatcatattttctttttcaataatttcaaaaactgttttcactgccatacaaacaaatgggttcccaccataagtacttccatgatcacctggttgcatggcttttgcaaatttctcattagctacaaaagctccaactgggacaccacagccaattcctttagcaagacatacaatatctggtaaaatcccatattgaaaataagtcatgattgttccagtacgtcccattccacattgtacttcatctaagattaaacaaatatcatgttcatcacatagttttcttaaaccttgcataaaatcctgatgacatggatataaaccaccttcaccttgtaatggttcaacaataattgctgatgttttttcattaatcaattgttcgacactggataaatcattgagcgttgcataatgaactccttcaatcaatggtccaaaggcttcttgataatgtagattgccagttaacttgacagctcctgttgttcttccatggaaagaatgttgaaatgaaataatttcactatcagcttttccatgttttaaataataatattttcttgctagtttcaaagcaccttctacggcttcagctcctgaatttgcaaaaaagacacctgataacttcgttgcagctttaactttttcagctgcttctatagcttgtgaagtatagaaataattagaaacatgtgttaatgtttcaatttgtttttgtaaagcttctacataaggacgataattatgtccaaaggaattgactcctatccctgaataaaaatctaaatacttttttccattggtatcatagagataaaccccttcacctttttctaaaataacatcatatcgaccataagcttttaaaaaagcattttcccctcttgtatataaatccatttttaaaccccctttatatctttagcaatagtataatacaaatcaagggcaattgttaagatattttcatgaaaattaaaagtttctgtatgtaaaccactttgatacacctgacatttggtacctaaaaagaaaaagatgccgggtattgctttttgataaaaagcaaaatcttctgataacataagaggttcttttaattcaatataatcatgattaactaaagatacaaatttttgataaagtccttcatcattaatgacaggcggataaaggggtggacatgaccattcaatttgacatccataggttttttctagaccttgatgtaaatcatcaatcatcccaacaagctcatgaaaaactttctcatcataacaacgtactgttccatgcatttgcgttaaactcgctacactattacgtgccgttcccccagatatttctccaatatttaaaacaactggatcaaaacaatgcatacgacgacttaaaatggcctgatattgattcattgcctgacttgcaatcactatactatcaataccttcttcagccaatccagcatgagcacttttaccatgaatagaaacatccatttctccacacattgccataagtgcaccacttttacaagcaatcttaccttcttcaataaatggcattaaatgcattccaaaaattgctttgacatggtatcgatcaaataatccactttccacaatttgggcagctgctcctggtgattcttcagctggttgaaaaatcaataaaatgttataagcaaaatgatcttgtgaattttttaaacgtttggctagtcctaaaagaacgctcatatgtccatcatgtccacaagcatgcatcattccagaatgttgacttttaaaatcaacatcatttttttcatttattgctaaagcatcaatatcactacgaaaagcaagtgttgttggttgatgatgatcgatatatacaattgttcctgtatcgacaattgtttcatattgataacccatttgtgtgagttcttttctaatataagcagctgtacgatattctgataagcctagttcaggaatctgatgcaactctctacgccatcttgttaaatcatccatcattataaatttcttaaatcttccattaattgagttttttctttcgttgcatcatttttttcatgtttaataatacgcgctggattccctgccactacagcattcgctgggacatcatttaaaacaatacttccagctccaacaactgctcctttatcaatatgaacaccctcaacaaccactgcatttgcaccaattaaaacatcgtcctcaataatgacaggtgaggcacttgggggttcaataacacctgctaacactgctcctgcaccaatatggcaattcttaccaacttgagcacggccacctaaaatagctcccatatcaatcattgttccttcaccaatagcggcacctatattgataatagctcccatcataataactgcatgatcaccaattgtcacattatcacgaatcattgcgcctggttcaatacgcgcattgatatgagttaaatctaacattggtatagcactattacgatgatcttgttgtaaatatgtatctgtaatttggttttgatttgcttttaaatatttcttgatatgttctaaatctcctaccaaaatacgacttgtctttgtaccaaaaacttgtaaagatggatcatctggtaaattctcaccattgatatataccttcacaattgtttgtttttttgcttgactaatatattgaataatttcttcagctgttctacacataaaaatcctcctcgttaataataccttcaaaaatacgttttgcttcaccttccataaatatatgaccatcttcatatgtaatatgtaatcttccacctaacaaatcaacaaagacatcccgatcacataaacctaataaataactggcatacatacaagcacaagcccctgttccacaagcttttgtctcacctgaaccacgttcccatacacgcattttgagatgttgtcggtcaacaacttgtacaaattcagtattgacagattcaggaaacatatcatgtttttctaggaatgggcctatttttttgatatcaaaatcaagattatcaacaaacataactgtatgtgggtttcccattgatagacttgttaaatgataaatattgccattgatttcaactgcttcattaatcattgtctttttatcaaacaaacatggaatatctttggtctctaaaataggctttcccatatcaactttgaccattgtcacttcctgattatccagagttaaccaaactttcttgattcccccaagagtttcaatctctagataagttttatctgttagatgatggtcataaacaaacttagaaaaacaacgaataccattgccacacatttttgcttcacttccatcaagattaaacattcgcatcttaaaatcataatgtgaagaaggcaaaataacaatcataccatcactgccaatcccataatgacgatcactaattctttgaataaatgttttattcattggaacattttgatggataccatcaaaataaatataatcattacctattccctgcatctttgtaaatctcaacatcatatcacctcaactttttcacaatgataacatttttttatcacaatgaaaagtatttttcatattttgcatataatatagtggtgagactatgaaatatatgttaaaaagaatcaatgaagtattatctatcttattaatagccttaataattatgattatacattatcatatttaaaaaacggtcctcagaccgttattttttcaattcatatccacaatttgaacaaattctttcatcgccaacctcttgtccacaatttggacaatatttcatgtcatgcgattcaatcaattcttcattgattggtgctttctttttcttcatcaacaccactacaatcacaacaatcaatacaatccctaaaccagtaaaaatcaatgtcatatctataccaccagaagctgctgatgaaatcacaatatctccatccaatccattgactgatgcttctaataaatcaatcttaacttctctaccatcaactgttccaatattagaagatgctttagctggcatttttacggttaaattcatttctacaccttttgcctttaaatcatctaatgaactattttgtggaaccccaccaagactattccctaattgatgactcacttgattcataggaattgtaaaaacaatagattttgttccatcaatatctttttcagttaaatattttgattgtttttgatcatctgtagttatcttaaacccaacccactttttaccatcaattgttttatcaattggttgaaatgtcatgtctttttgtttgtctttcaaataattatctttcatttcattcaaccaatcctgggcagtgatttcacttccttgaaaagttgtttcatcaatcagatactctatattcattttcattgttttatctgatttcacttcagtataaatattcattttcatacatccagtcaataaacataccattagtcctaaaaataataactttaatttcttgtgcatattatacccctctctatttatctctttttattttatcatattatgaatcattcgtgcatattgattgttattttgttaaaaatttttataataaaattaagaaggtgatttcatgaaaagattagaagatgttgatgtagaagttagcaatggagaaatggatgatcaggagattcttgcttatattcattatttaaaagacaaatttaaaaatgaaacattatcttcattaaagctaaacattgatggtgattatgttgatatgcattaccatcttattcccactccttttgaaaggattcgtcgtattactggttatttagttggaactttagaccgttttaatgatgccaaaagagctgaagaaagagatcgtgtcaaacatgcagtcaaataataaaaaaagtcgtatgactttttttatttgagataatgatactcatgttcccatggatgattaatgaaaaactcagcagaggctttggcttttgctaaatccatgtaagtataatttccacattcttctttttttgcgccaggaatagcttgttgccatgttgcaatttgttgaaaaacatctttaacaagatgatgaattgtttttaaatctaaatcttttgtaattaaatagaatcctgtcatacatcccattggtccaaaataaatcactttatctttataaggaccatttctaagtaaagttgctccaatatgttcaatggtatgagcagcctttggatctaatggttcatccacattaggctcacacatacgaatatcaaaagtcgttaattcaccatctactcttgaaatataaactccttttttcaattgtgtatgatcaacactaaagcttgtaattctttccattatttttctccttcattaaaagtaaattgaatgaatttcataatatcttcttcatcctctatagcatatcttacaacagtcttatctaaatatgcaataacaatatgattcaaacgataataagtcacatttccaactttggcttgtttaaatttttgtaatgcttgttgataagaaagtcgtgtcggaaaagaaaattctactggttgtgattggggttgatcgaattgttcttgggttctatcaagttgttctgattcaataatcaaatattgcattaatctttccttaacatgatcgtttttacaaagatatttttcttcaaaataagaatgatctaaatcattaattgtataataaatcataaaaggattagtttcttttgagatttcttgatattctccatatgaataatattcctgaaccggtaaaagagcatcttgttgtaagtcttttaacccttgaggaagaaaaatacaggctacatataaaagaatacctaattgataaggctttttaaagtgtgaatgcatcactttgtaaataagcactaccccaacaagaaaagccatagcaaatacaaaatacattcctcttaaattaaagaatggtaaaataaatccaagtccaattgttagagagaagaatattctttctaaaatacaacatatttgacgaatttttatatattgactttgatgagtttcttgaatcttatctaaaagaacagaacttcctcctacacataaacaagttactgaaaaaagaaaagccataatgatcaaaaaataagtttgatagtgaacataaaaatcatgaatattccattgtacaagtgaacgattcatattaactgtaaacattccaataacaaacaatgtaaaaacactcacctgtaaaggtattccataatgatcaagtaataataaacgatgagttcgctcatcagtatgcaaatcaacagcattttcatctctatgacgataaatatgcaaatttcttgtctttcctaaatattcatatcctaacgctttgattgtcgctaaatattcttcactaggtgtttgataatcaaattgatatttataaatatgatcatctctttcaaacttataaaagaaataacccacttcttttaaactatagccttttaaagacatctgcctaaattcttctaacaaatcatcttcataaacataataattagaaacaaacttatatttatacttcatacttcactcctcctcatatcttttataaaacaactaaaaaaatcacaacataaatgaataaactcaataaaataatatcctttatttgacttaataaagtcctctttaataacttatttgaaaaataataataccctattgaaatcataaaaaccaaacttaaaaacataataatctgaaacgataaacgccatacataaaacgaagcatacaataaaaccattacaaaaacaggttttataaaccgtgtcattatagtcattatttgatatgatttcaaaagaaactttgatttatgattcatataaatacgcataaaagatatagctatagcctcaataacaaatcctaaacttaaacataaatatgcccctttaatcaattcatcaatatttccactcataccataaaattttaatgcaaaatacaatccaaaaattaaattcataacaatatctgactgactatatttttctaaaataaccttacgatgaagattttcatctgtatgcaaatctaatgcattgatattttcactcacaaaaacattcccgccaataccatgtgctccaacatactcatatcctgcttcttttaaaacagataaatattcttcatttaattcattataatccatttgatatttacaaggctgaaaacacttttcaaacttaaataagaaatatccaatcgactttaacttccaacctcgctttgacatcatatctaaatactctataaattgatcttctaatacaatattttcacctgccaaagtatatttatatttcatgactcacatcctccaataaacgaatttgttgaagcattctttctttttccaataaaagtttttctttcccttttttagtaataacatatgttttcttttgtttagaaatatcttctaactcaatatatccttctttttcaaaacgtggcagcaaggtataaagtgttccagcacctatttgaatttcattatttgttatagttgcaacctcctgcataatttcatagccatgccttggctgatataatgatagaagaatataaaacatttgtggtgttagagtttcaaattcctttcttgccatacaatcacctcattatattgatattcgatatatctaatatcaatataacatatttcgttttattgtcaacaaacttcttcaaatgaagattataaaattttcaacaaatttcaaaaaaactctttacaaaagttatcaaatcttatataatctatcttgcctaattgagttgggtcaatatggcggttgtggcgaagtggttaacgcaccggattgtggctccggcattcgtgagttcgattctcatcaaccgccccatataagttattaactcctagaaataggagtttttattatatcaaaatatatatccaccgaaaatccaccaatttttttattttataagtttacctaactctcaacctaatttgataccatcttcaaaagcattgataatggtaaaattttcaatatcgatccatgaattggtaatatcatcaatcatactgaaaagtataaatatcagacaaatataaataatctaatacagttattaaaagttaatcctgcaaaattgttaaatatgaaagatgggatgtctatatcaagaaaccaacaacactcaaatatagagttgatgacagacgaaatccagttatcaaaaaactagaaaaggctttttaagaaaggccagttaaagtagtataggcatctctttctaagaaaattacaacttaaaaaatcaaaaaagcattaaaaatgataagtatcttttttatgctttttttggtaaaaaaagaaaaaagagggaattttgaatttaatcaaatattctctccattgtaatgtcattaaattgacgacattggtttcagctatgaaacctttattatacaaataattaaataacctatatctcatttacatcttacaagtatcaattcttcatgaatcgcttatcactatataataaatagcttaagcatagaaaatctaagtaattaaaattattcttagtttttaatatatagattaaatatatattgttgacatatatatttaacgatgataacatttagatataaatagttaagcgattacatagaaggaggtttgcatgatgaaaatacgatttaaagtattattgattatcgtagaaattctactatttttatctttttttcttacttggtttagtgatggagatttaataactttaagaggtgtggatctccatatatttattgtttggttgtttttcttttatattggtacatggttttctgtattttctttatcgaagaaatttcatataatatctttgattgcatctatctgtgttttcttactagagatatataaattctttacttggcactatttaactataacaggatatattagtctaacattttctctggatatgacatcttttggattctatttatctttatttatttgtttttcgaacattatattgaaaatcatatggatgaaactatgcattaaatcaatacataaaaatgaaaaagagattattacaaaataaatttttactgttgattatagaatgaatcaacagtatttttaagtaaaaaatatatttcaatatcttggtatttctcattaaaataagataaaaaatcattatttagttaatttatataactattactttattggtcatgaggtatatgatgaaaattctattgtgtttttatgatcaattaggtgtaattttatgcttcttcttaagttattatcacattcctgatacatgtaacgaatcaagttaaattttgagtgtcaaaaaattaatatatagagaaactaaatatccatattgaattagaaagtgatatttgttagaattttacaaaagaggtgtcatcatgtctaaaaaaaataatttctttcggttagagatgttgtatttaaaaattctagatgaaaaagattgttacggttatgagattacacatacgctaaaagaaagaacgcatggaaaaattaatgttaaagaagggaccatgtatcctattctttacaaatttgaggaaattggatatataacaagcaaaaaaaagttgattggtaaaaaaatgacaagagtttattatcatttggaaccctctggaaaagaataccttgataaaatttatagtgaatataaagacatggttaatgtaattagtgatttaatggagggagaatatgaataaagatataaaacgttactttaaagaatgccaatatttatttgcatattgtggaaaaaaagaaagaaaatatcttaataagttaaaagatgatatcgatgatggaagtcatgaattaaactatgatgaaatcgttgaaagattgggttcaccacaagaagtcattatggattattataatcaagaagatatttatgaattaattaagaaagcaaagtttgttagaacattaagaaacatttttatattatttttgattatatgtacattattcttttcatttagagcttatatatatcaaaagacatatgaggaagtcaaagatagtaataatagttattttgaagaatcaattgaaatcatagaataaaaggagaaaagattttttcaaaaattattgtattattaataagtataactgcaatgatgtctatttcaaatgtaaatgtgttagataatatcaatttatatacttatatagaagaacaatttcatgatggaagttatattgaagtaacgattgaataaaataatgcaaaatcttcaaaaagtggtacaactgcattagctagtgttactgccaaacaatatcatcaatattgaaatgttctaaaaacaataaatcgagcagtcaaattagcatgtattgcttcagggaaactttcttaaaagtaaagttataaaaattcccaccaaaataacaccaaaaatgataaaaaagtatgtcttagtatataaaattatacaaagatatacttttaaaatggcttaaatacagtgttttttatcatcttttatgcattgacatgatctcatcaaccactccatataagagattaactctttaatatatgagatataatcttcatttttaacttataccaaaattataattaagaatactatttgaatattttattaagacaatttaccagatgaactacaagttaattttaaagttctatcaacagtattagtgcagatacctaaaaatatatattgctttaccatttgaatctttaaaagcactggtcttacttttgctcgttgtagtggctctagtaattagacaatcttattcaacggttatttcaatatatgattcatcttcaaaaacttcttctataaaagtattttctattgattttgtttcataagcaaatatgtagttagtatttagaaaataataactgttctccttaattttgttctttagcttcttcaattgttttgtattccaagtaacaaattaaagataatgcattaatcaaaattacaccaatgctaacaaaaaattttttcatttttcccacaaaacggaaaaatatttttacaatttcttagatatttcttaatgactttatccatttaaatttccctcccacaacataatattgttgatattataaatagtttcaagatattcttcccctttagactcaatatgataatgcacacgtgttaatctcttaccaaccaaaactttttgatcacttatatatccttcatctactaatctatctaatattggatacaaagttccttctttaatttgtattttatcatttgaaagtttagcaagtaattgagtgatttgataaccataacaattttgttgttttataatttttaacaacaacatttctaatttaaaaaaattatttgatggtctagacatacttacctcccaaactcattaaatcaaatgtaatattaacttcaatacatagagcaaaaaaagtaattgttgacacgtgtaatatcccatctttgacaatttataagcaataaaagtcctgaacccaatgtgtataaagggtttcaggactttttggttctgtaacgaatatgcgtaaattattatttctttgtattttttataatatttctcattttctttttgcttgtaatttcataatcggttctaaatccaaacttataatgcagctcatcggttaattgtgttcttgtgtatgctggaatatatccgttatactgtgtgtcaaccaattccatccctctaattgtctttaatatttctgtagctgtatatttattgtctaatatattagccaataagcgatagatgatgagtgacataaagcacgttagaaagtgtgcttctatcctttcttgtttttgtaagtgtactggtcttgccttaaaatcagttttcatgattctaaaacattcttctatttgccatctttcctctgaaacattgataatggcttggatatcatcatcttctagattagtagatactgcatagaaaccatcgtacattgcttcattatctatcttctcttgatttaaatgatagtattcttcaacagcgactccgttttcatcagtcgttattttttctataaatctggatggatcgttaggattacgtgttcctttttttaattttccgttagaacgtatcttattcatcgctctttggacttgcttatctctaatcttcttttgataaatagcatatttaggtgaatatgtaataattaatcgttccttgataggagattctataggcaattctttatagaatactctattgagattatcttcacaattaaattcaatatcatcaatattgattcttttagaactcttacttcccagttctaaaaatcccgtatgtctaagtgcgacttcacgatcatctttctttaatttttttaaagattgtgtaatgatataagctctattctgtatactattaaattgtttattcgtttgtgacgctaaaccgctgtcactgcagtaaacaaattgacctaattgaaaatccttaacgattctttcttcaagcggttttaatgtgacttgttcgttcttgtttccttcatataaatcaaaagccaagggtataccatcaccatccatcattaatcccatacctacgataggattaggtctgttttccttgcctttaccatacattctaaatccatcatcttcttcaatttcaaaataataatttgtacagtcataatatagcttactgccatctctcttcttaatgtaatttgtattcctgtaaagttcagattgtatatagtctgtttccttagaaagaatagataatgcacgataaatatcatgtaattcatatttaggcttttctaataaggtagaagcaaattcataactagatcgtttactgctgggacatagaatcctagaatagattagatccgataagattgcatccaaatcatatttgaacttatatcttgctttaatgtttctacatatattgttgatttttaacttgtaataaatatcttgcagaaatagataaccgcaattatacttacgattactgtttggcttaataattctatcaggggagaaagcaatgatagtatcatgattatcatccttttctttttgagtaagttctttggcgtattgtttagcccaaatgatcaattcatcacgagacatattcttttctttacataagtcatctatcttacctaacttttcgtatgtctttgaagtacgtgaaccgttagaatatatatctttgataatataaataaattcatagttttttgatttactgatagtcactctcataatatagcctccaatacttataattccattatatcatacattacgatgaattacgatataaaagtaataaaaagttgacaaaaaaataaagcatctatcaatgctttttgaattatacacatatttaactgtcaaagacccgtaacttcaatacatagagcaaaaaaagtaattgttgacacgtgtaatatgaatgatacaataaagataagatgtaagcgctatacaaaaggagtgaaggaggttataaaaatattgaagattaaggcgaaaaaactataagtataaaattaatgcgcatttttttagcaataataattatgatagttttatatccaactagtatttttgctacagattctattcaaaataagaaaaataagagttatctgaaattatccatcttactgagggagaagttttaataattcaaggtacaaataatccattgttttggtaatttcaaaactacaatcaagctttcatagacattgtgaattatgaagctgatattctatcatctatttcttcaattgctcaacttgaaacacttagcaaagacaattggaaagtgtattttaaaaatttatattgtttagaaaacgacaaaaatacaagtaaagataatattatcttaaatcaattttttacagtttgtgaagatcacaaaataaataaagaagcaaaacaactgcaggatgttacgatattactaatgcacaccacacaagtaattattgtgaaaaagtaggcagtactaaaaataactgagaaaggttaagtggtttatatgtcatactttaatgaaaataaatttttaggaaatgtattttgtagacttttattaattattgttatgtctttttgtttgattgcatgtcattcaaaacctaatgtaggcaatgttaacaaacaaattggaaagtcaaatgtgtatacaaaagaagaaattgaaaacgctatagatgttattgttaaacaatttgaatctacagattttaataattgtaccttgactgatctttggtatgatgaggatgctgctataaaacagcaaacggaatgggctaaagaatataaagttgaaaatgttatcgttattttttctaattttaaaacaggtagtctttcaagcgagagtcctttaacttctcatactacatataataattataattggatacttgttaaaaagggaaataactgggaaattagagatcagggttattaagtggaaaggaaaaggtatataagtccaaaaataaatacatatcatataccaaaataagcatatgaaaaaaatattctttttcttcattatcttaagtagtattttaatgttttattcatttatagatatttataaagaacaggatactcaagatgtcattgaaaattttgaaatcatggcagataaaccattgcaatctattacttttacatcaaatatctataaacataatcaacaatttatttacgatttaaaacaattagctgatgaagatcatataacaatagttaaacaaagtatagatattaaaaataattgctatattaatcatatttatactcacgaggatttatctacaatcacaaatcttgcgattaaagataaaatagatttttcttcattaaatacgaaaaatttttattctaattatcaaaaaaatcaatcagaactttttattttaaatcatgatattttagtagatattaaaccattttcatatttaattaataatagatattgcattggtacttatgatttttatgcctctaccaaaaaagatttatctcatttcattgattcacttaatcaaaaatattcatcatatattgaacaatttaatgattttgaaaaagaaccacatgcatcttattttttgaatccagaaatgaaaattttaatcttattttcatttattttatttaccacgtttttagctatttggatttccaagaatagttataaaaataccgtttattatcttcatggttattctactttagaaatgtattttgaattatatggaataacatttgttcaaggaataggaatttctattttatctttagttattttatttttaataagaattcaacagattaatgtaagaacaataccttttattattgattgtttaaaatatctaggtattcaatggttaggcatttttagtattttctttatttatatttttattcaaaaatgtcaacatagtgcaattttattaaaaaagaaaaatataaataaaattcttttacaaggtcacttctttattaaattgttaagtcttattatattactacctcctctaacaagtcattgtcttgcaattgaaaataatataaatactcatcgatatatgaaagaacaatttaatggcatagaaaattatcaacatatctatagtatgaaatttgagtaccaggattctcaatatcttgaatcatatgatggaaaaacaaataaagttactaaaatatatcaggatgcttatgatcttcttgaaaagaataaagccatatattatacgaaagaacctctatactatacttcgggaacactcataagaacaaacgctaactatctttcattgtgtccacttatagatccattaggtcatcaaataactatgcaaatagataatcaaaagaaatatctctttgtaccagaagatatatataatactattcacgaagaagatttcttaataagcccaaatgattcaattgagaaaattgccattgcatcaaatcaaaaatatattaaatatttggatggacagtatgatcaagaaactattcatcaacccacttgtatttttattgattccaaacaaagtaatcgcaaaccttatagaggtctttatattcctcttagtgaaaataaaataaacgatttattaaaaaacactccttttgaaaatacattattaatgaaaagtttagaagatacacttaaacaagaaacaatgcttttaccttcacttattaaaaacgatttagaaatagcaatgtgtttctttattttcttaggtggtttagtttttgaatatttttatttatactacaatatctatcgtaaagattttgcaattaagaaaatgcatggatactcttttattgaattaacctatcctatctttgttgaaagtctatctgtttatgcactgagtttcttatattttattattcaacaatatcaaccattgactttcttattcatactactattcattgatatgattattcaccttttgatttatggatatctatatcatcgaaaaatatctactctactttgggaggaataactcatgaacgaaatatgtataaagaatttagataaggtttattcacaaaaaatagtttttaaagattttcattatacttttaaagccggtaagatttatgccattattggcgaaagtggaagtggtaagtcaacgttattaaatatgattggtttattagacgatccaactcatggtagtatttgttatgatcatgtaaatattaattctcatcataaaaagaccttatggtatttaagaaataaaattaattatttatttcaaaactatgcattaattgaaactgatactgttttaaataatctaaaaattgctttaaaacatgttcgttcttcacataaagaacagcttatcaaagatagtcttaagaaagttggcttagaaggttatgaaaaagaaaaggtttattgtctttcaggtggccaacaacaaagagttgctctagcaagattgtatttaaagcctgctgatgtcattttagctgatgaaccaacaggaaaccttgatgaaaagaataaaaaaatagtgcttgaagcattaaaagaatttgctgaggaagggaaaattgtgattgtggcgacacatgatttatcaattgttcatcaatgtgatgaagtcattgaattaacaagatacaccgattaagtggttgttacaacaatcactttttttatattcatacatatattatattggtgaaatatatgataactataagtgtatgtatgattgttaaaaatgaagaagatgttttagagagagcattaaaatctgtgcaaggtattgctgatgaaattattattgttgatacaggttctactgattctactaaagaaatagcttcttcttatacaaacaagatttatgattttgaatggtgtgatgatttttctaaagctagaaattattctttttccaaagctactaaagattattgtatgtggttagatgctgatgatgtgattttagaagaagatcaaaaagagtttatgaaacttaaagaaactctttctttagatacttctgttgttatgatgcgttataatactcattttgacaataatgggaaaccaatttttacttattatcgtgaaagattgttgaaaagaaaagatcaattttattgggaaggatttgttcatgaagttattagtcctagaggaaaagtgatttatagtgacattgccattacccacaaaaagttaaaagctgcaaatcctcatcgtaatttaatgatttttaaaaacaaattaaaagatggtgttattttttctccaagagaaatgttctattatgctagagaactttattatcatgaatattatgatgaagccattagtgaatttaaaagatttttaaatactcatcagggttggcgagaaaataatatttctgcctgtcaatttttaggttattgttattatcaaaaaaatgatatgcagcaagctgttagctggttattaaatagtctttgctatgatgttcctcgtgctgaagtatgctgtgatttaggtcaatatttttatgaattaaaatgttatgaacaggctattttctggtatgctactgctttatcatgtcaaagaaatgatgaatcaggtgcctttatttctcctgattgttatgattatattccctatatgcaattatgtttatgttatgatgccatcaaggattataaaactgctaaattttataatgatatggctggtcaatgtaagccaaatgatccatcttatttacacaacaaacattattttgaaaaaatcaatgaaaaataaggctatttctataagcctttttttcatataagcataatttgaattatatcaacaaaaggaggtgaatctatgaataacacgtttgataatatgttcgatgattttaatcacaatgtatgtaattatcaaaattcatgtaacaatccatgtgattattgttcagattctcaatgctgtcaaccaataacaattaattgtgagaccggccctactggtcccacaggagcaactggggtaaccggtcctactggagcaactggtcctactggtgcgactggacctatgggtccacaaggtttcccaggaatacctggtgctacaggagcgactggaataggtatcacaggtcctactggagccacaggtgcgacaggtgctaatggtatcactggtccaaccggagctactggtcctactggggcaactggtccaacaggtattagtattactggtgcaacgggagttattggtcctactggtccaactggggccactggacctactggggcaaccggagcgactggtattggcatcaccggtgcaacaggtcctactggagccacgggtgcgactggccctactggggcaactggtccaacaggtattagtattactggggcaacgggagtcattggtcctactggttcaaccggagccacgggtcctactggtgcaactggtcctactggcattagcattacaggagcaacgggtgcgacgggagctaccggtcctactggagcgactggtatcagtattactggggcaactggtcctactggagccacgggtgcgactggacctactggccctaccggagcgactggggcaactggcgcaacaggtcctacaagtattagtactagttgtgcttgtgtgcaacaaatgcgtaatgttttacaacagttaattcaactttatccaaatgatagtgtagttattgcaatggaaagtggaaataatgcaagtggacgtttagattctttattacctggacctgattcaaatccaatagctggtttattgcaattaacaaatactcaaggtgttcctcaagaagctatttctatttgtcacattgcttcaataagaataacaagtgcagcctataacaatggcattgtctatttacctgcacctactcctacacctgatacttgtgaagccaattgtgaagctgcaatccgtagttatcttcctgttggaacaacaaatgttagtattaatgctggtggacagacagttggacaaggaactgttttaagagatgagtatggtattgttgttttagctaatggtaataacagtaatccaacttttatttctacttgtaaagctgaaattattactcgataactttctaaagaactataacctattgattatagttcttttttagaaacaaaggaggtgaaattatggatcaagagcatctttgtcaatgttgtcgtcctatcaatattaattgtctttctggcataacaggtcctacaggtccaactggaccaactggtcctagtggtggtctagctaaccaatcatttgcaagttttgctaattacgcaacaattttcacaaataatgcacctatgaatctttatcaagatgttgctgatataaccggaaatattaccccattaaatacaacaactattcaattacaaccaggcttttatcaaattcaatactctgttagtgccttattaaccaatccaggttatatacaaattacaccatcatacaatggagcatcgcatattgagtttggtatttatgccaatatcaatacagctcgttcatctgcatggggtagtcaatctattattattgaagttccaacaacaaccacattcacattaacattcagttctaatacaacgcacactgaaggacaactcactttgacaattttaaaattagagcgttcctaaaaataaagttttattcacaagataagggttaatcccatagtctcattttttctattcacatatattatgataaaggaggtgaaactatgaataactcatattacaatcatggtcaaaatatgaatacagtgcaatgtcaaccacaaaataattgtacttgccgtacgtcatgtcaatgcacttggtgtccaaaatgtcgttgttgtcctccagttactgttaattgtggaagtttggtaactggtccgactggtccaactggacctcaagggattcaaggtattcctggacaaccaggaatgatgggaccaatgggtccacaaggaatccaaggaaatacaggtataactggtatgactggcgcaactggtccaactggtcctactggagctaatggtattcctggtccgactggagccactggaaatacaggtccaactggagcaaccggagccactggagctaccggagcgactggtattggcatcacaggtgcaaccggagccactggtgcgactggtccgactggtccagctggtaatggtagttctacaatcattccatttgcatctggaacacctgtcattttaacaacaacaactggtggggtagcaggtagtgcagcttttgttggatttggaaattcagcttctggtttatttatttctggaaatattattgatttaacaaatccttgtggagctccatcaaattttgctttcatcatgcctcgtgctggtacaattacggctattgatgttttcttctcaacaacaacacctttatctcttgttggtactaatctcacaatcaaagctcaattatatgaatctgcagcatctaataatattatgacagctattccaggaacagaagtcacattgactccaactttaactggtacactcttaactggcacaatagcaaaaggtttattaacaaatttaaatattccattcaatgcacaaacacgattaatgcttgttttaacagcaactgcatctggagtaagtttaactaacaatattgttggatatgcaagtggtggtgtttctgttgaagcaaattaaaaaaccagaagaaattctggtttttccttaatctaaatcttctccattagaagcgataactttcttataccaatagaatgaatcttttcttgaacgatgtaaatctccatgtccttgatcatccatatctacataaataaatccatattttttatccatttgtcctgtcccagcagaaaccagatcaatacatccccaagttgtataaccaaataagttaacaccttcttcaacagcttctttcatagcttgaatatgacgacgatgataatcaattctagcaggatcatgacaaataccatcttcatcttctttttcaataagacctataccattttcaacatcaaataatggaacttgatatcgatcattaatgatatgcaagaaatgtttaaaacctaatggatcaatctgccatccccaagcattagcttcaagatatggattcttaactgttcctaatacatttcctcctgttatatcattttcatctgttgtatgtgttgtcacaacacctgaagcataatatgagaagcctaaaaaatctgcttttccagcttttaaaatagctttatcttcaacacttatatttaaatcaatatcccattctttccatactctttgagcaaaagatggatattctcctcttacttgagtatcagcactataacagaagaaatcttggaactttttatatcttgcaaatgcatccttaggatctggtgttaaaggatatgccatattcccacaaatcattgcaccaactttcaaattcgcatccatttcatgtgcgacgattgttgctttagctgcagcaactaattgatgatgtaaataaataagatttctttgagcaatatcttttggtgtatcatcacctggcataatgatattaatttcattaaatgtcatccatttatttaccaaatctttatactcactaaaacatactctcgcaaattcaacaaactcatctatcattttacgatttgtccatccaccatattgttcatttaaagaaacaggctcatcatatttatacaaagtaatgacaggatccattccatatttacgacattcttcaaatacatttcgataaaaatcaacaccttcttgattaataccaccttttataccataaggataaattcttgcccatgatatagatgtattaaatgttgtataccccatttcagccattaaagctatatcttctttataatgatgataaaaatcacttgcaacatgatttgtataatgcaaatcatcaaacaattgatatttagctccttgtggtaatacgccaactgcttcccaacgttgatgagctctttgaccatttttatctaaataccaaatttctctcatccctgttgtactacctgctgtacaataatctactgcaactggtgattttcctccttcattccatgctccttcaatttgagcagcactgattgaaccaccccataaaaaattattaggaaatcccattattcttcctctccttcttttatatttttatcagcagcaaaaacaacccctgctgattgtcttgcctttgttgctatttccatagcaatcaaactcttttccatcatttcttcagctctttgataatctttttgttcaataattttaacaaattctacaaattcaaaatacatacgatgttttccattttgttcattgtattccatttcactttgatcattttttaaaactttaaaacgtgaagcattattagctggtgtatctaaaacaatacatccttgatcaccttgtatacttgtcataattggtgctttacaatctttagctccaattaaaaccgctttaaacgttccataatctaaagttattattcctgatgtatcaatattcttttcaatatttgcttgatattgaacagtttttggagctccaaataaagcgactaataaatgaatattataaatatttaaatccattaatgccccacctgattttgtataatcaaaagcaggtaagatatttccttctttaaaagcattataacgtgatgaatattgtgaatagtttgctgatacaattttaacttgtccaatttcatttaataattcttttattttaagaacattaggtaaatattgtgtagaaatagcttctaataaaataagttgtttttcttttgctagtttagctaattcttttaattctgcaacatgtgatgtaaatggtttttcacaaatcacatgctttcctttttctaaagcttttttacacatttcataatgtaaatgattaggtgaagcaatatacatcacttctacttcatcatcttctaacaattcatcataacaactataatacttcttaattccttgttcttcagccatttttttcactttatctaaagaacgtggggttgatgcaatcgcttctaattcaatattttcgacttcatgaataaaacgaaacaaatcattaacgatcatcccagctccagcaattccaactttcatcttatgcctccttagcaacttttgttgcttcttcaatgatttctagtaccttaatgacttcttcatctttgacaatcttttctccaccattaaaaataacatcatataagttatcataaataataccataatctcctatttcagtaggaacttttttagtaatatcatttccttcatcatcaatataagataaagttccccatttatcttcaggtaatggttcaaaactaatttcaataggtcctggttttggttttaaagcactttgatgtcctaaagcaggcattaagaaacttccttttttaccatgaataataaatcttggataatctaattttacataataacttgttttaacaattgctttcatcgaatcatagaaaaaatcaatatcataataatcatcagatacacctggattatcaatacttcgacaatcatatactattttctttggtttaccaaactgaccgattatttgatcaattggatgaacagctaatccatataagattccaaaaccttttcgtgatgcaatacttggacgataataatcataatgagattcaaattcaacaatatcacctaaaaccccagattcaatgactttacgaacagtacgcatatcagcatcataacgtctattttgattagccattgctactaaacctttttcctttgctaaatcaaaaacttctttagcttcttttgcagtcatagcaaatggtttttcacacaatacatttttaccatgttctaaagcttgttttgtataagagacatggaattgatctggggtattcacaacaattaaattcacttcttcatcattcatgacttgattgatatcagtagtaaatgtgatatctggataccatgtttctctttcttcatcaccaactctatcttcttctcgacgatagatatatttgactttaattgtgtcttttcttctttcaacatatggtaaatggtaacgacacacactattaccaaatccaatataagcaactactaacattctaaatcctcctttgataactctattttatataaaagagaatagagtttatataaggatgaagaagtttgtaatttgatttcatagattgcagttgaaactgaaattcgatttcattttctctattttctataattgaaatttaatttcataaagatattatttttgataaaataggattaaggaagtgataaaatgataaaaacattatttgaaacaacaccattaaccactcaagaaaaagtcattgttcaatatattcaagaacaccctgattgtttattagaacataatgctaaagaacttgcacaactaacctatgtaagttctccgacaattattcgttttgttaaaaaactaggatttcaaggatatcatgattttcaattaacttatgttcaagaatatatgttacatcaaaaaaatatttcttcacgtcttaatcaagaaagttcaattaatgatgtgatagaaatattaccacaaatatatcaacaggtttttcatgaaacaaaaaatatgatgcaaaaagcatcatttgtaagaacgattaattatatgttacaggctaaacaaattgatttttatgcaaatgataataattattctgaagttcaatctgcttgtttaaaattaaatgctttgggtattcgtgcacaagcttttaatactttaagtcaacattatgttgatacttttcaacctcaggatgttttatcttttgttgttagtcactcagggaaaaatcaaactatggtagatgctgcttattatttaagaaaaagacgttctcgtgtcattgcgattactggtgttatcgatccaaccctttcattaatttgtaatgaaagtttatatattgatgcatcacttcatcatttacctagcagtattatgttatatggtttatctattcactatgttttagatactcttataacaattttaatgataaaaaaagacaaattagaaaaaacatagtttagactcaaaatcaggatttcaattcctgatttttttatatcgaaaactttttatcattctcatcaaattatcagatatgtctcataaaaacattgaatatatctcatttttttacattttcataagacaataatgagacaaaattgagacccatacccttttatcctatgttataataaatgcgttatcagttcctcccttgaaaggaggtgaggattatgtttattgaagctttgacttcatttatcgtctctatcgcagcagggattgtcttatattttctttgcaagtggcttgatagtagacataactgataataagcataaatgaaaagtcaggaggtcacatctcctgactttttcctgttgaggactatgttctcagcagtgacttcatttgcaaagatatcatagcatattttggattttgaaacaagaataatattttcattatttacttataaatattttataatcctttgtttctctttaaaattatcattaaacatcctataataaatttgtaaataacaaagaaaagaggtcaattatggaaccatcatatattttacagattcacagcggatcatttgaaaatgctcatactgactttagacaaatcaaaaataaagttgaaaatattttaacaaagaaaaaaattaaagctgtcatatttggttggcatttaaatcaatcattgaatcaatctattctagattttttccacagcaagaacattgcttgttatttttggttacctgtattatcagaaatagatttaataaaagaaagcaagacaataacaaattatacagggcaaaaaggacagaatgttcaagtcattgaggatgaaagtttttcattcttatgccctactgatttaagaaattataatcatgtttgtgatttatatcaagaatacatttctaaattagattttgatggtatcttcttagataaaatacgctatccatcttttgcgaatggatatgaagaaggttttggttgtttttgtgaaagttgtgaaaatgaatataagaaatatggtattgatttagattatcttaaagatttatttatgaaacatgatgataagttattagatggtcaatatgatgaatatggacgctatatattcaaagatgcaacagttgatttattttatcaaacaagagcacatattatcactgaatttataggaaatctttgtgactatttccattcacaagatttaaaagtaggtttagatatatatgctccattctttgcctatcattgtggccaaaatatttatgagttatctaaaaaagctgactttttaaaaccaatgttttatcgttttacaacagctccagcaggtatgcaatatgaatatgatgcctataaacaatattttaaaaattcttcttattttgatttagcccctatttctttaacttctttagaaaagcaatgtcatttcttaaagaaagccaaatgtgatgtttaccctggtattgaaatcaatccaattgaacatatttgtagcaccaataaagaaagatttattgaaaacaaaactttcttcacaaaatactttgatagtttagtctgttgctggaattgtttattgatggataaagatattgaagaaagtttataaaatatcaattttaatatattgatgaacaaacataaataaatttttatataaaaagtcaggatttccctgactttttaatattttctcaaattataaatgaccatattttgcttcatcttcagcaatgtttcctttatgttgaagtgatttttctgtatattgcataatttcaaacttattcccatctggatcatgaatccacatctgccatgtttctgattgtcctttatttggttctatatcaatctctacacctgctttgaccaattcttctcttgcttcaaatatatcatcaaccatcaaagcaaaatgtgaatatcctaatcttgtatccggtttttcatgttctaattgtccatcacctttaggaaaaagttctagatattgacccgaagctaattcaataaaaatatatgcaatatcatcgggattcgtttctgcacgtgctgcccatgctcctctttctttttttcctttataagcagcatatcgcataatgattttagcttttaaacctaatttattttcatagaaatctcgcattttatccatttgatcagtataaaaagaaagatgcataacttcattaaatttcatgattttcctccttaaatgtttgcttgattttttctgtaagcattgcacaatcaatagaatctttaagactcatacgttgactttcatattgatgatttttaagacattgatgaacttcttctatttcagtataaaaatcatcaaatatataatccttatgaatgtgataagcttcttgattatttaattctattgttgcttgtgttggacgatagaaaggcatacatgttatttttccttttgaaccatagatagtcattaatggtgaaaggttctcatccatagctatttccaaataaccaacttgcccacttgtaaaagtaattgtaatttgatcatgacaatcaacaccttgcatatattgcacagatgattcaattgattgaactggactatcaatataatcaagaatacttgcaatattatagctacctacatcattaagaatcccgccttgttcctgatcaaataaatatcttgtttgtgaagcatttgttatgtcataacaaaaacggttttcaattcttaatatgtcaccaataagcccttcatcaagttgcttttttaattctaagacaagtggaataaatcttgttttcattgcttccataaagaaagtctgattttcttttgcaagtgatgctaagtcttgcatttgaattgatgataaagtggctggtttttcacacagtacggctttatgttttaagatagcccgtctcgcccactcataatgttctttatgccatattgcaatataaacagcgtcaacttgtggatcatctaataattgttcataatcatcatacgtcacaatttctggatataaagctttcaattctgctcttttagtggcagtatgggaagcaactgcataaagtttcccattttggctataagacaagccctttataaatctacgagcaatattgccagcaccaataattccccaatgaatcattttactcacccttttcttgaattaatttttgataccaataaaatgaatctttcgggattcgttttaagcttccagttccatcatcttgacgatcaacataaataaaaccatatcgttttgacatcataccttcacttgttgaaacaacatccattgcagaccatgttaaataacccataatttcaactccatcttgtatagctaattccatttgttcaatatgcttttgtaaatattcaatacgataatcatcatgaatttgtccattttcaagtgtatcatatgttcctaatccattttctaccaccatgataggaacttcataacgttcatacatattgtttaacataattcgaaaaccttgaggatcaattgtccagccaaatgcagttttatctaaacaaggatttgtttggacatcttcatggcttgctagtgaacttttataatatgagacagcaataaaatctaaagtattttcttttaaaaattgtaaatcttcaggtcgcatatcaatttgataatcctgcatttcttttagaaaatagtatgggaattttcctttaaccataacatcagtataacgattattacttctttcattttgaatcattaaagcataatctattggtgaagatgtcaatggataacaaggtgtcccagcaacttcacatccgacttttaatgtcggatcgatatcatgacatgttttaaccaatatagcattggctaataatttataataagcacaaagatgtaaaacctgttcacgattatctgttggttttaagattgctccaccaaccatatataaagcatgattcatcacattgatttcacaaaatgaaatccaatatttaacgcgatcatgatatcgattgacaatggtttcaacatacttttgatacaagtcaacagtttgacgattagaaaaaccattatatttttcaaccacccatagaggcatatcaaaatggattgttgtaataattggttctattccatatttcaataactcatcaatcacatgatcataaaacattaaaccttcttcattcacttccatcttttcatctaaaaaaatacgtgaccaaagaatagaaaaccgtaatgcttttaatcccatcttagcaaacaaagcaatatcttcttgataattttcataaaattctaccccagcttgagaaggataaaaaccttcaggtcgatttaaatatatcccgggttgatctaaatattgaaaacgcgtttctcgcccttgtggaataatatcaacaacagtttctttacgactagaaaagcctccctcgcattgtcctccactgattgaacttccccataaaaaattcttattcataggcttcatcaaggatcttctttgttgaagaacatccaactccggctctatcaatacctaaattgattaaatcaattaatctttctttactgcgaacacaacctgatgctttgactttaatcttcccctgagcttctttcataatcaaatcaatcacttctaaagaagctccaacattatgttcccctttaaaataacctgttgacgttttaataaaatcagcttgacctaaaatacaacaacgaactgcttgtttgatttcttcttgagtcaaggcatcagtttctacaatgacctttaatccaacatgattttgatgacataattgactcatttgcttaatttcatcaatgacatcatcatattctccacctttaattttgccataattcgcgaccatatcaatttcaaaaatatccccttgatcaataatcgcttgtgcttgcgctaactttgatggtgtatgacttgatccaaaaggaaaatcacatacgacacaaagtaacgtatgtgatccttgaatacaatccttagcaatttcaatcgcatcaggattgacacaaacacttttgcatccatagtctacaccaatcataatattgtcttttaattgtgtgcgtgtaaaacttggatctaagactgcatgatccaaataaccagccaacacttctttagaaaagtcttgtttatttgtcatttgtcatacctcattttttatattttatttgtatcatttttccggttaatccaggataatctcctaaatcaactttttctttattatcataatgagcaataaaccatttgtttttcttttttaagattccttctctttttaacagtttatcaccagttcctcttaacaataaacaaattgttaaaaaaccttcatcacttacacatattggtgtgtaatgcaatgttgtactccataattctataattgttccttgtgggacataaaagatttcacataatgaagaatcatatgtatcatctaacatatcccataaatgtccaacaactagaacataatcagtgacagcgacaattgtttcgctgccctgatgatattcaatgccatttaagacatcattatgcccagctacaacgccagccataacatccatatatccataaactttttggcttaatctttgaatagaagaatattcttcaataacttgaacgcttggttcataacaatttccaattttgggaggatggacatttgctaatacataggcgattgcatcttgaacatcttcttcaatgatttttccataagttttaaagctttcatcttgtatactacgaatctgatatgctttattcaattcttggagttgttttaaactcacttatttttttgtctttcttcaatttctttaagcatatcaattctgacttgatgtctaccaccttcatattcaccgcttaaccaggcatcaacaatcatcttagctaattcaataccaacaactctagcaccaaaagctaacatgtttgtattattatgttctcttgaaagcttcgctgaataaggttcactacaagtcacacaacgaatcccattgactttatttgcagctaatgaaattcctacaccagtcccacaaataacaattcctttatccacttcaccactgacaactgcatttgcaactgcttcaccagcaattggataattaaaacgctcagtactatctgttccataattcaaaacttcataaccatatttttcttcaatgtaacgtgtaatttcttttttatattctactgctacatgatcatttccaattcctattttcattcttatctctctcctatctatctttttggggttgccatctttgcccaagtataagcttttcccttcattgtaatagctaattgataaatgttttctggccaagttccaccaccaaaacctccatcaccaatcgcatgaatatctgccccagtttgtttcatcaaaatagcaatttgacgaattgtatcttggtcagcaatttccacattactatcaagaaagcacataaccaatgttccaggtttataacgatgagtaaattctgtgagttcacgaatcatttcaacagtaattccatgtcttgaaccaggagctggtaaatcaatcacatcagcccctacatcaattaattctttaataacttctttcgcatcataatcagctaatggatctcctaacactttttcaacaatcccatcttcccattttccagcaaagatgagcatatcttcaccaagaatttctcttgcttctttagttgccaaaatgacatccttaattgacgttccacttcctggatttcctcctaaaacaatgaatgaagcccctaactcttttgcttttaaaacattttctttagagtacatcatacttctcatttcagcctttttaggatccattgccagttcctgatcatctgctttaggacatcccatataaattcctacgggtttttcactcaccaaagcctttaattctttcaatgataaaccttgcataccattagccccttcaggattatcaaaatgaaaaccatttaacataaccatatcgccaccaaaagcaaacattaactcagtacttgtacacccatttattaaaatcggattattaagatatgtttgtcccatgatgacacgaccttcagattttaaaatcgattcctttaattgcattggtgtatatttggctacttcacttgccttagcagtaatcaatcttgtaatatgataatctaatttcataagctagcctcctatttatttaataatgcttttgcacgatctagaaccttttgaccattcatcattccataatcttgcatattgattacttccacaggtttatctggatacatttttacaacattttttaattcaaaacggacttgtggtcctaataaaatcacatctgccgcatccccaaatgaagcaactgaactaactggatgagcttcaatatgaacatcaataccttcctttttggctgcttcattcatacgattaacaagtaaacttgttgacattccagcagcacatactaataaaatattcattatttattcctcctaatctaaatctttaccatctgaagcaatgacttttttataccaataaaacgaatcttttctcactctatgcaaatcaccttctccttgatcattcatatcaacataaataaacccatatcttttatccatttgtcctgttgtaaatgaaaccaaatcaataggagcccatgttgtataaccaaaaatattaacgccttcttctcttgctttcattaagctttgaatatgacttcttaaataatcaatacgataatcatcatgaattgttccatcttcttcaaccttatcaaaagctcctaacccattttcaacatcaaataaaggaacttgataacgatcatttaagaaatgcaagaaatattcataaccaataggatcaatctgccatccccaatcagatgcttttaaataaggatttttaagattttcagaagttccagctccatccaatgattcaccttcattttgatgagttgttacaacattagacatataatatgaataagctaagaaatcagctttaccagcttttaaagcttcttcatcatcttttgtgatatttaaagtcacattattttgtttccataatcttgaagcatatgcaggataataaccacgcaccattgtatctgcacaatatccaaatttatcttggaaagccttataatttgcgagaacatcttttggatcacaagtatatggatatgaacaataaccagcaatcatacatcctacactgatattttcatcaatttcatgagctgcaataacagcttttgctgaagcaaccatttgatgatgaagtgattcaaaagcaacttgtttcccaccttttccttcaaaatgaagcaaaatattaatttcattaaaagttaaccatttattgacataatctttatattctttaaaacatactttagcaaattcaacaaattgatgaatcatttcacgatttgtccaaccaccataagtttcttcaaaataaactggttcatcatatttatataaagtgatcacaggatccatcccgtatttttgacattctttaaaaacattacgataaaattcaacccctgcttgattgactccaccttcaaccccatgtgggaaaattcttgcccatgaaatagttgtattaaaagttgtaaatcccatctcggcaagcattgcaatatcttctttataacgatgatagaaatcaatacctacatggttcgtatatctcacatcatcaaataaaacatatttagcacctttaggaagaagatcaaattgacgcatctttcctcttgagccatcggcatttaaataatgaatatatcttcgatcataagttgttccaggatcaccgaaatcaacttgtacaggactctttccatcttcatcccaagccccttcacattgcgcagcactgattgaaccaccccataaaaatttatcgttattaatcattgttaacctcctataattgtcttaactcttgacatatttcttgataactttttgcttttccaaataatgctgaagttcctaaaataaaaccatctacacctatttgtgataatgtttgaattctttcaggtgaacaagctccatcaatcataactttaaaaccatattgttctttcatttgacaaagctgtttaaatttatgatcaacaaagtttaaatacttttgaccagcaaaccctggattaacactcatcaccatcacataatcgacaagattcaatgcttcttgaatggtttcaattgatgttcctggattaatggctaaaccaggatgaacatgagcatctctaatcatttgtaatgtccgtgtaatatgagaatcattttctggatgtacataaataatctgaaccccaatatcagcaaatttttgaatataatcactcgctttattaaccataagatgaacatcacatggctttgaagtatgactcacgatatattcaatatcctgcaatcccattccaaagttaggtacaaaacttccatccatcacatccagatgaaaaatatcaacgcctccttcttccaacattttcacttctaattctaaatttccaaaatttgcacacatcattgatgggcataataacttttccatttattttcctcccctagttaaacgattactcaaagttttaagaaataaaggttttcacctttatttctaatattcaacattgttttctaagtcctctccatgactagcaataactttcttataccaataaaatgatttttttggataacgcttcatagatttaattgtatgttcataacggtcaacataaataaatccataacgcttaacaaatccttctcttgttgaatgcaagtcagtagcagaccaagttaaatagcctaataaatctacaccatcttcaacggcttctttcatacaggcaatatgtcttgctaaatattcaatacgataatcatcataaactttatgattttcatctaattcttcggttgctcccataccattttctagaattaaaattggtaattgataacgatgatatatttccattaattgataatagaaaccatctggatcaataatccatccccattctgtttcatcacaataaggatttaagttacctgcacgatattgtacaagagcttcttgaacttcttttggtgctggtgctgcttttaaaacttcatcatcttcatgggctttaacaacacttgttgaataataagttgttgaaatcaaatcaggttgaactgaagcaattaattctaaatcacctggttgcatatccggcatacagtcaatactctttaaataatttaagaagtattttggatatctaccacgacaataaatatctaaatatgcccagtttgtcatatacatttgatgaactgcagctcttacatcctttggattacatgttgctggataaaccatgccagttgcacaattaggtccaatttttgcatctggatcaatttcatgacaggcattgacacatcgtgcataagccaatgttaaatgatgttcaacttgccaggtttctttatcagtgagatgtggatcccccataatatattcttgatcgagatgaaataaattcggttcattaaatggtgtataatatttaattctacctttaaaatgttcaaagattgtcttgacatatttgatatataaatcaatcacttttcgatctaagaatccgcgatatttatccattaacgcttgaggtaaatcatatgcatataaagtggctactggagtgattccacgcttaatcaaaccatccaccatacgatcataaaatgctaaacctgcttgatttggtgtttcttcttcaccagttggataaattcttgtccaagcaatagaaaaacgataaatattaaatcccatttcttgatacaaatctaaatcttcttctaaatgatgataatgatcactcgctatatgaaagttggaataaccattttttaaaatacgtgtatcactaatagataccccttttccatcttcattccaagcaccttcaaattgttgtgcatttgtcgaacttccccacataaaggtatgaggtaatttgcttgccattttgtttccttctttctgttatcttatagctttattgtaaagcatgtgggtaatcgtttccacacaagtgaatggcacaccttgtgccattgttaagacaagcatatatagactattgtctttgttgagtaaacgttatcgcaaagattattttttatcgagtctaatgactctaccactattatacacaatatgagtaatcgtttccacaaaatgatttgaaaatattggtaaaaacctatataataaagataggagtgaattttatggataaaaaaagaagcatctcgattaaagaaattgccaaattagctaatgtttcagtagctactgtttcaagagtcattaataataatgggcgtttttctgaagaaacgagaaaaaaagtacaagatattattgataagtatggttatacaaccaatatggcagctaagagtttaaggatgtctaaatcaaagacagttggattgattgttcctaatattgataatgaatggttttcacatttggttttagagattgaaaagtatttctttgaaaaaaattattcggtttttatatgtaatacttcgcaagatgaacaaaaagaaattgcttattttaaatctttagattcaaaattggttgatggaattatgtgtatttcaggaattgaagaaattcctacggatgttattacacgtaatattccaattgtttgtattgatagaaagcctaaagatcataataatgtttattatgttgaatctaatcattatagtggtggttatctagcgactgaagaattgataaaaaaaggctgcaagaagattgcaattgtttctagaaataaaacattatcagtgaacaaacaacgtttagaaggatatcgtcaagctttaaaagattatggattaacagaatataaagaattacaaatattacttgatccttcatcagctaactatgaaggttccagagaagctatgaatcaattgattaaatcaaagattccttttgatggtgtctttgcgacaaatgactggcgtgcttatggagttatggtcgcattaagtgaaaatcatattaatgttcctcatgatgtcaaagttattggttttgatgatatttctatatctcattcatgtcatccttccttatcaacaattcgtcaagatacagttggattagcgcaaaaagcttcaagtttattattaaacttaatgaatgataaagaaattcaaatggaggaaagacgttttatattaccggttgaagtgattcaacgtgattcaactcaaaaagacccagaataatgggtcttataaattatctttgattgttttttctacttgatgataaatatcaatgagatggttacaccattcattatattcatcatcttttatttttaattcaggatgagcatccatatattttaaatacattgctaaacctttttcaattgagatatgatgatcaaaatgatcaatatctctttttattttactcatatcataacaacaagaatattgtttatctcctaaaaaagctgtagtatgatcatatttttgtgacatcgctaataaatcactaggaatatgcactatatgtggctgtttattcaacaagcgatataacttatgataaatcatatcccatgtcacaaatcttggattaatattgtgataggcttggccaattgttttttcattatttatcaattggataaagttatcagcaaaatcaaatgtatgagtacaatgccatgtactcttaccatcaccatgcacaataactggttgatcatttaaaatacgctcaacaacactccaacagcttttaccttttacacttaatggaatacgatcatatccataagtttgtgaaggacggacaatcgttatgggaaaaccaaattgctgataagctttaaaaaataattgttcacatttggttttatcttgtccatattgtgagtaaatattgttttgttcttgagtttcatcaatacatatggctgtttcgtgattataagtagcaacggttgaaataaagatgtattgttgtattttgcctctaaataattctatttgttgaatagcttgttgtggtttatagataatgaaattacatacaatatcaaaactatactgttttaaaacatcttgtaattgttcagtatcattaaaattacaaataatttgagtagccactgttggtaatgctttatgtcctctattgagtacatataaatcaatagaaggatctatagctaatttctcacaaattggcattgagattgttcctgtaccaccaattaataaaacttttaatgttttagtattcaatatcattttttagatcttctccatttgttttgataactttttgataccaatagaatgatttctttttataacgttttaaatccaataaatcatcaaagtccctattcacataaacaaatccatatctctttctaatttctttatgactacttaaaaaatcaattggactccatgctaaatatcctaataaatcaacaccatcatgttcaacagcacgttttacactattgatatgcttttgataataaacaattctttcatcatcataaactttaccattctctaatttttcatcaatccctatcccattttctacaataaataatggtttacgatatctttgatataaatcaataagtgaatatcttaatccttcttcatcaatttgccatccccattcattggcatcataatgtggattctttaatcctctcgtatcaaacaaaactgcatcttctaattcatttaagtctttaatatctttaaacgaagcttgaacattactacgataataagaaaatgcaagataatctactttttgtgaagattccttaataacttttctttcatcatcacttaactcaacatgaatatttctattcttcatgaagttttcaaaataatcaggtaattctccatttgtcattatatcaaatggtaaatagttatgcattttgtttttaaaatctgccatgatgatatcatcactttgacatgttaatggatagaatggagcatgtccaatcattcctccaacccatgcttgaggatcaacttttttaatcacttcaacagcacgtgcatgagcaacggctgtattcactgataattgtgcaaacaattcactttgactcataccttcaggacgatatactcctgcaactaaatctgattgataaggtgctaaattgatttcattatatgtcaaccaatatttgacctttcctttcatccttgtcacgactgtctcaacatgtttagcatacaaatcaataaccttcttatttaaaaaaccattatattctcttaataaatgatctggcatatcaaagtgtaccaatgaaacaactggctctatccctttttctaagagatagtcaatcatatcttcataataggctaaacctttctcatttggctgttcatcatctcccatcggatggattcgtgaccagacaactgaaaagcgataggccttaaaccccatctctgccattaaatcaatatcttctttataatgatgataatggtctgtcgctacggctgtatcacagaacattggtgcaattcctttctctggtgtcactaccaatgtgtcatacacatttaatccctttccatcttctaaatatccaccttctgcctgtacattacttagggctgctccccataaaaaatctttcttcatctctctatcctcactttgttgtcatcattattgtcatctgtccatctaccttgatttcacagttgactgggataaggaagttatcccctaccttcacttcttgattatctacctttccttgtccttttacgattgttgcaagttgataatgatcactttgataagtgtcttgaccatcaatttctagttttgtaactgtaaaagaatcattggaaataaagactgtctgtttcatatgtgcagtttcactcacgactggttgaatatgattttccatctcctttgggtcatatgatagacaatcaattgcttgttctagatggagttcacgttcatttcctgcagcatccttacgatgataatcatagaagcgatatgtgatatcagttgcctgctgtatttcatagacaatgctgcctttcttcaaagcatgcaacaagcctgctggtagataaacaaagtcacctggatgtacatccaaatgtttgatgagctcatcccagcgatcttcctgaatgtattttcttaattctttttcatccttagcatgatgtccataaacgatattggcatcatcattggcttcaatgaaataccaggcttcattcttgcctgaagaaaagccaactttttgagcatgtttagcatctggatgaacctgtaagcttaaatcatcctcaggtccaaccaaagatataataactggaaattcaccttcctgatttccaaaaagttcctgatgatgaatccataaatctcttaaagtcataccttgataaggttcagttaaacaaactgtagagtccttctcctgagcactaaatgaccatgattgaccaatcccatcaggaaaatctcgatatccaaaataatccttcactaatgtatgtccccaaattgctggacgaggaattggtttaaaaaataaaattcccatataaacacctccatcttcattttagataatttcattatctttaccatattgtaaatcgtcataatttatgacaagttatgctttgaaaataaaattatattttccatttttgaataaaaagaaagtccctttcaatgaaaagcacttcttttttaatgaactcaattgttattgataacctttaatacatagttataagcgcaaataatgcaacgacagttgtcattgttgccaaaacagttgcagtagtcacaacttgtggtaaaacacgataatgatattggatattataaagattatttacttgttttgattttgtacaatgataatcagataataaagcaaccaacaaaataataattctcatccacagacttgttccaacaccccaagaaacgggccaaggaaatatagctaatccaaaagccaaaatagcagttccaatagctggaataacataaggattttttaaatcttctacagccttatctgttttcttttttgtttcttttgtcttttcagctttttttctatcttcatatttttgagcatcacttcgttgtttaatgagcttaacttcagctccgcagctatcgcaaaattttgctgaatcgtttatttttgcaccacattttctacaatacataaaaccttctcctttattttaagataactgttgataaattcaacaacgcaatataaccactcataatcaatgaaaccattgcaaatttactatttccatttggttgaaaaccttttttcttatcttgataatcaatcacaaaagacataattctacaagctatagccccaatataaccaataaaactgataataaacacaaattttgcatccatcccacatgcactcactacagatccaacaataaaatcaagtccaattaaagaaacgaggaaaagcatgagtccaagtttactccagttattttcacggggattatgttttaaagcaggatcacgtttttcttctctttgtttagaaattttctcctctgctttttctaaatccttcattgtaactttttttaacggtttaccacaataagtacaaaaagtagaatcatcaggtaaatctgaatggcaatatggacattctttcattttcttttcctccttagattttataaaggagacctgctgacaagtctccttcttttttaagcagttgctccagcagtagcagcagcttcttcttcaattctcttaacttctgatttttcatatgctttccagaatggatagaagataaccataccaatcaagaagttaataaatacaataacaaatccaccaattgaaccaccggcagccaaatatcctaaaataggagatggtgtagcccaaggtaaatttaagtacatctttccaacaaatccaattgctgttaaccaataagttaaagcacctgtaatcgtatgagtcacaacaaatgggataattaagaatggatttaatacaactggtaaaccgaacataattggttcaataatacagaaaatagctggtgggaagcagatagcagccaatggttttaaatgaggcaacttcttgcttgacataaacatataaactaagattggccaacagcttgatacccattgagataatctacataagtttggagtccaagtatatggtaattgagaaacagcagttccagccatagccgcagcattgttttcaccaatccaagtatttaagaatgcacttgttacagcaccagtgatattgtcaccatgtaaaccgcaagtccataataatgcagataagaattgttgtaatgaataaatgaagatgttatcagcagcagataatactggtaataacatatttccaatcatttctggaatattgaaaccaccaattgttctaattccccaacaaataattgcaataatgaaataaggaataattgctgagaaactatcagaaattgcaggtggaactgaatcaggcaatttaatacgaatgttatatttataacataaatgaatcacattaattgcgattgctccagcgatcattgccgtaataactccggcaccaccccagtaagtaatttctaaggcactaggtaatttatcagcagcaacaccttcaataaataatttacctactgcattgtagtttaacaagataaatgcaaagaatgcaccaacagcacctgttgttttgttgaaacctttgatttcagcatattcagcacccattgcaataacaatgtaaactgccatcatacccatagataaactgttaattaaagctaaatctccagcccaaggtttcatgaatggcaataatgcagtttttgttaaaccaccatctgaacacaatagaaagataattaagaaaatagaaccaaccatcgtaacaccgattgatccgaccatcccatttacgactgctttaataaatggaatctgaccgaattttgtcattggtccagcgatgacatcgacttttgccatcaatttgtccataaaggacatgttttcgttagacatataaattctcccttcgtctagttttttgaaaacgagtaaacgttttctctttctaactttattttagcacctctcttgcttttttctagcgaatgaatcgacataataaatgccgagtaattgtaattttcaaagaaagcctttattttataagggttttgagacattttgggaaaacgatttttttgagaaaacgtttacatacttgtcgaaatttgctataatatcataacaaagggagggattttatgaatttaaacaaaaaagaaattgaaatcgttaaactacttatttcatcttcaaattacatatcttcttatgatatagcgactgcaacaggaatcaatcgacgacttgttagagatgagatgattaatattaaaactatcttaaaaacactaggttatgaattaatttctaaaacttctaaaggatatattatcgaaggaaaatcatcacattccttacaagctttagctgatattattgaagatgcagaaagacagcgtgaatcagttttccctacccttccctgggaaagacgaaactatattcaaaaaagattaattgaagctgatggttatgtaaaaattgatgatttagctgatgaacttttgattagtcgttctaccatttctagtgatttaaagaaagctagacatgatattaaaaagtatggtttaacaatgaaacaaaaacctaattatggaatatgtatcgttggtgatgaagcgaataaaagaaaacctatttgtgattatcagtttacaaatttaagacaatctgagatgttttatgattatttaaattcgtttatcgcaagtgttgattctttggaatatggaattttagagattattaaaaaacatcaagtagagatgtcagatattgctttatgtgattttcttttaagtttatcaataagtattatgcgtattttagctggacatacgattactcatcctcaagatttaaccttaattgaaggacgtagtgaatttgcctgtgcacgtgatattgcacattttattgaagaaaaaaatcaatgtgaaattaatgaatatgaaatcaatcaaatcgctattgaacttatttgtaaacgttcatcaaaaggaacaacccctaaaaatgtacctgaggttgcacatcttgtcaatgagatcttagctgaaatctatcaacaaacattactcacatttactgatgaaaagttccatactgtttttactctttatattgaagccgcgcttattcgtttaacttatcatgaaaaaattagaaatcctctctatgatgaattaaaaacaacttatccacttgcttatgaacttgctcaaattacttcttcagtcattgaaaaacatttacaccaatctctttcaatgagtgaattggctttctttgctattatttttaacactgctattaatcgtaaaacaaccaacaaaaagaaagtcttactattatgtggcttaggtggtggagctgaagatttgacatcttatcagattttagatcgttttgaaagccaaattgatattgtcaaaacatctcaatattataaattacctgatgaagatttaagtcaatatgattttatcatttcaactgttcctattcataaaaaactagctattccttatatcaatatttcacaaatcattagtcaagaagacttagataaaatagataattacttatcttatttattcaataaaaatagaatggaaacactattccatcctcaattatataaaaccaatgtcaaagttcgtcataaatcagatattgtcaatgaattttataaaatgctcaaaactcaatatccaacaattaaagaatcatttaaaaacaatctaattattaaagatcaaagtacaatgattcattatcgtcataaaattggtttattaaaactcaataaacctttaaacaataataatattttagcagtcttattattaaataaaccaatcctatgggataaaaaagaattacaaatgattattcttttctcttgtagtgataataataattatatttataatacaatttctaatacacttatgaatctttctttaaaagaaaaggatatccaaaatctttttgaagattctagttatccactctttttaaaaacaagaaatttaaattagtgtggggtcaacccttcggtctacaattccgtggggtgtccctttttttatctctaaattttaaaggggtctccttcatattaaaaaaatcctttcatgatatgatatttttgcagaaacaaccatatatgaaaggaaagttttaactcatggattatgatactataaatttacttggtttacaacctgatgatattcaagatttaaacattgcaagaactgataatactgtttttattaatgtcactttatccagaaaaattaagccttgtccctgctgtggcagcttaaatgcaaatatcaaggattacaagattaaaaaaatcactcattctattttcaacacaaataacacctatatcaattacagatgcagaagatttatatgcaatgattgtcataagtcttttcttgaagataatcctttcattgctgctagacaaagaatttccaacgctacaattatacaggttctcaaggactgtaagagattgaattatacctttacttctattggtgaaaaaaatcatatctctacttcttctgttgtcaatatttttgatcaatatgtcaccatgcgtcctaacccacttcctagagttctttcaattgatgaattttatctaggcagaacctgggataataaatttgcttgtatcttcattgattgggaaacaagtcagattatcgatatatttccaagcaggaaaaaattcaagctctattcttatatgcagtacatcaataaaagtgaattcaataatgttaaatatgtaagcattgatatgaacacaacctacagagattttgcctatcatcattttaagaactgtattgtcatggtcgattcatttcatgtcgtaaaaaatattaacgatgcattaaagaatgtacgaattcatgttatgtccaagcaagatagggacagcgttaattattatttgctgaaacattggaatcaccttctcatgaaacgaaaaggagacattgaagataatattcctcaatacaataagaaaatcggctatgccataaacaagcctcaaatacttgaattgatgctcaagattgatccattattaaaaaatgcatatgaatggaaagaagactatcttgacttcaaccaagactatacatataaaaatgcagctaagagatatgatgaattatataatgaattagtcaagttgaatatgaatgagtttaaggatgttgttggatttttaaaaaactggagaactgaaattttgaattctttcattcttattggtcaaagaagaatatcaaatggtccaatagaatcaattaacggaagaataaaagttcttttgaaaacatcattaaaatataagaactttgaaagattaagaagccgtataatgtactgcataaataaagattccttacctctattgacaaataaaaagaagacaaatagagagcctggaaaagaaagaggaaattataagaaaaataaagaataatcgttagaaacggttgtttctgcataataaaagtatcattcttaaccccatggttttgaatgatactttattcactttaaacacatgtggggtcaataaaaccccacgttatttttgagtctcgtttttacaaaccccgcggaaatttagagaccctaaaaacaatgattcaaaatcaatcataaggaatagtcactattcctttttataattctttcacttgtttatcaaattcttctaaccattcagattgatattcctcaatcgcacccatatcagataatttagttaactcactatctaatggtaattgtcctaaaatatttaaatcatatttatcagcaacatcttttaaatgactatgaccaaaaacataaatcttatgtccacaatcaggacactctacataactcatattttctacaatccctaaaattgggatattcatttgttttgccatattcacagctttagaaacgatcatacttacaagttcttgtgggcttgtcacaatcacaataccatccaatggtaatgattggaaaattgttaatgggacatctcctgttcctggtggcatatcaacaaacatatagtctacttcaccccattgaacatcgctccagaactgtttaatcattccggctaagattggtccacgccatacaacaggatcctcagcattttctaacaataaatttgtagacataatctttgttccttgtgttgatacagctggaataatttcttttccattagaataaatttgagttccttcaacgccaaaagtcttagcaattgatggtcccgtaatatcaccatctaaaactgcaacttgatatccttgtctttgttttaaaacagccaataaagatgtgattgaagatttcccaacgccaccttttccactaacaacaccgatgacttttttaacatgagaatgggcattcataggtgctaaaaaacttctttcagaacaatcttcttggcatgatccacaatcatgattacattcattactactcatactatctctccttcatgtttattattctactacatattttaaaattattcaaaggatgtggttttttaagattgaatatactcttttttaaaagtaaaacctctccctctgacttcattaactttactaacaaccataaaagcatgttcatcaatactcaaaactaactcatttaattttggtaattcacgattagaaacaacactcataatcactggatattcatttttcatatatcctgaaatagactttaacattgttgttccacgatctaattcttgaataattgcattattaatttcaacatatttagcagatacaatcatcacttctgtttgagcttttccaaccaccaatactttatctaaaataatggtataagttgcaactaaaacaataccatataaaaccatttctcgatctgtatagaatacttgcattaataaaattaaaaaatcaaaggcatacattgaaaccgatactggaagtcctatttttttattaataactagtggtggaatatccattcctcctgttgatgcattacatttaataacaataccaattgcacttccaattaaaactccacctaagattgctgctaataagggatcagttgttaattgagtataaccaattgtattttcaaatacacttaaaataaatggaaaataaaaagtactaatcaatgttgataatgcaaaagccttccctaaaaaaataaatcctacgacaaacattccaatattaaaaattgatacaaatgctgtaataggaatatgaaaaacatgattggcagcaattgccaaaccagttgaaccaccagtaattaaaccatttggaacaatgaacaataatactgctaaagcataaattgtatttcctaataaaactcctattatattttttaccatcttactagacataatcaacctcctataaaaccttgagctattataccatgtttttgtataaaatacgatactggtcccacaataaatatgatatatttttttaaacatacttattgattgatgattattttttaaaacgttatacttatatgaggagggtatttatgaaacatattaaaaaaataatgcttatttttttatctcttataatgtttttttctttatcagcttgtcaattagataatgataaagatgttcaaaaagagtttgatacttttattcaaaatgaatttataaagactatggaaagtgattatacttcatcccatatcttacttatcaatccaaaagattatggtgttgatgttcaaaaaataaaagttactttaggtgaatatattaatgatgaacaaatccaaaaagataaaaaagaattggttaatacacttaagacattaaaatcatttaagcgtagtgatttaactgatgaacaaaaagatacttatgatattttctcatttgaatataaaatttataatcagttaaatgatgagcgatttgatgattatcagcaattatttgaaagtatgaccggtattcattatcaattacctacaatgcttgctgattggcaattacgtaatgaacaagatgtcaaaggtttaattattttagttaatgatgtgaaaccttatatggatgctgctttagaatatacaaagaaacaagaagaaaaagggttattaatggttgatatagatagtattattgattattgtcaacaaattattaagagtggtaaaaagagtgctgtcttgcaatcaatgaatacaagtattgatgagcttaatttagaaagaagtcaaagtatagattataaaaagcaactagaggaagcctttgttcaatcttttattcctgcctatcaagatattataaatgtaatgaaagcttttccatctggaaagaataatactgaaggatatgcaaagtttaaatatggtaaagaatactatgaattgttgttacagaaaaattgtggttctactaaatctgttttacaaatacaaaatatgatgaaagctgcctataataatcatatagctcgtttacaagagattgttagtgaaaatcctgatattattaatcaaaaagagcctcagacaaaatatcagaattattcacagatcttaaatgatattcaaaaaaatttatttaatgatttccctgaagttaaaaatattgcttatcagattcaagatgtcaatgaagaattagcatcttcttcaggagttgctgcatatttcaatattcccgcattagacagtaaagagaaaaaacaattacgtgtgaatcccaaatctgctaatatttcatctatttctacttatcaaactgttacccatgaaggatttcctggacacatgtatcaatatgcttatatgtatgaaaatcaaacgacaccttatcgcaaagcacttgctaatagtaatgcttatgttgaaggatatgctgtttattcacaatattatgctaataaatatcttaaagatgttaatcaaacttatttagaaatgcttaaagaaaatgagatggctacttattgtataattatcttagctgatattggtattcattatgaaggttggtcttttaataaatttaaagattttcttaaagtatctggacttgattatggtaatgagaaaacttttaaaaaacaatatttacaattacaagctaacccagcaacctttgaaccatattatgttggttgtgaagaatttctagctcttaaaagaaaagcccaaaagaaacttggcaacaaattcaaagatattgacttccataaggctattttaaaaagtggaaacgcaccatttagcgttgtcgaaaaaaatgtgaatgaatacattcaaagtacaaaataagagaactttatccctggagatgaagttctcttttttatctttctatgaattcatttttcttttttgtgttctcaaagttaaatatattccacctaatgctattaaagcaactgttacagtagtaagaattgtagtttcatcacttgtttttactgtatcagtaccttgtgtttgatttccaccactaggtttattaggatctactggtgttggcgttgtttgatctccttcattaggtttgtcaggatctacaggtgtttgattcttttgatatacatagacaacgatttgatcatctctttcaatcattccctttgcattattaggtgtttgttttaatgtatatccttcaaattcttttgcttcagttacataatcttttcctacttcatcttgaataataataggatcacataaatctttgttattttcatctacatattgaatagtaactttacctgtatctgcaacatattcaacattttcatatttgcgaattaagttttcaacttcttcaactgtataaagcgttttatcaatcttttgatttaataattgacttaattctttaatattattttgaataattggattttcagttttaatttttgcaagaccatctttaatagtttgaacaatagttttgtagtctaaagcagtataattcttttctacttgtttaccaagtaaatcaggtctaggtgattctactgcataagccaaacgttcaaattcatcataagttaatttattttcatattcagcaccccatgttttatatgcgaatcctgcatatctagggaataatgttctagaaagaacgtattcaggaacatatccatgagcatcatcccaaattgggaatacttgaccttgtgcttgatctaatccttcagttaatatttcatccctgttatagaatggataattaaaagcagccttagaatatgtatatcttgtgaaattttcatataagttttttggtgctggtctatctaatttgtcttgattttgttgtggccataaatcatgataatttgaagccgaactagacataacattatatccagctttaatagcatctgaagcaataattgaaccatagatactaccagcccagaaatcaatagtgattctcttatctaaatctacagcactgttaaatgaaaacatgttgtcattccatacaaggacattaattcctttttctaagaatggtttagcagcttcattgaagaataatttaagtgcatcattatgatctgcttttggatttcctgttacttcttgagcccaagcagttaatttttgttcaccagtgatgtcttgattccaaccagatgtttggaaatattcatctccaccgatatgaattgtatcagcatggaacatatctgctgcttcttgataaattgagaaaatatattctctaacttctgctttagagaaatctaagtttgaacaaactttagttattttccaatcagaatgataatcagcttcttgtcctgaatgtcctggaaaatcaacttctggaataacattgatattaaatttctttgcatgatttaccaattcatcaatttcagattgagtccaaaatccaccttttctatcaactaattcaggagcaacttttgaatcaaaacgaataccttcattatcttttagacgtaattgtaaaacattttgtttataataagccatttgctcaatttgattttttaaccaatcaattgaataatatcttctaccagaatcaacttgtaacccacgtacattttgatctgtataatcttcaacagttccacaatttaaactatctctttgtgtaaatgcttgaagtatagtcatagaaccattttgaattccttcaatataatcagagtaaatcattaccttatcttcagtaatatcaatttgatatgtatcttttttacatttttgtttttgaattgtatcagataatttaaattgaataggtttcttaataagtgtaattccttttgcatcttttacatcatctatagcacgaattgtatatttatcaataagtcctttttctttcatagattttgcaagatattctgtctttgctttagaatattgatcagtagaaaatacttggtttcttttagttaatttaaaagtcccttttgtttgttcaaagttttgtactgctggtacagtattagggaaaccatctgttttttcttcatatgcaatagttgttatatcttttgcatttgtttcaagttctttaatttcaacatcatcaaaatagaatacacctgcacctttttcatttcctgtccattccatataggcaaatgcataaatttgatctgttcttggcccagttttgattgtatgcacatttgtttgccatgaagttgacttttgattatttgttttgatatttgaagctaatttccatggataatcagctgaataactaccatctacatctaatacccctgtagacatctttactccagtatcattgaaataatgagttgttacttcataagttgtatttggtttgacattgtcaataacaacattgacacttccttttccataattgtatgaccaaattggaacttcatgttcattttcaggtttataatttcctaccttaatagaatattttccatcataagatttttcgcttgttctcactgctttgtataattgaacattgcttttgttaattgcattttcaaatgaagggttagtaatgtaaggtttttcctcagcttttactaccccccccgctcatcacagatgtaaccatcaatgatgttaagagcataagagatatttttcttgttttcttcatgtttaccatcctttctgttttcataaaacattaatcccaaatcaatttccaatatattcttatttcaatattattttcaaaaacacctcccactttaatctaaaatagcactttcgacaaattgcactatttcttcgtctgaaaatattgtaaacgatttcattttgttatacaatatctaatcattagagcattttctaattttgaatggattttcagattttgataatttgctgataacctagaataatttgttataataaattgacagaaaggagaaagtaaagttgataaaactttacaatgtgatgaatatggctggctttatttacaaactacaaaatattattaacgcatcaccagaaaatgatgatactgacattattcttgcaagatgcctgctaaagaatataaattctattactcacaaaacatcactacaagattttgcaaatatttgttatacttcacaatcaagtataagtcgatttgcccaaaaaataggttatagtagttttaatgcttttaaatctgattgtttaaatgttcaagaagaattacaagagcttgctattgacaatgctgcatttcaagatattgattttaataaatatacatctgatatttctcattgtcttttgcaaatgcaaaatgattttcctttaagtgaattagatcaaatctgtgatttcattcatgatgctaaacgtattttaatttttgcaacacatattcctggtgatctaggaaatattttacaaagaggattactgacaactggtaagtttgttgaattttatccacgcaaagaacatcaaatgaaagttgctaaagaaatacaaaaagatgatttgtgtatttttatatcattagaaggaaccttattgatggaaaaaacaataacaattccagcaatcatgtcatcttcaacatctattttaattactcaaaatgtacatacaaaattctcagaacattttacaaaagtcattggtttaggaaaacatgatcatgaaacaattggtaaatataaattattattctttattgattgcttgttacatcaatattaccataaatatgttattcaacatttaaaataaagctgtaagaagataactcttaaataagttattttcttacagctttttaatactttatttttttaaaatataaagataaaattattttagtttatataaacaaatataaaaaaatgaaaacttagaaaatctttctttataagcactaaatccaattcatttttaactctacaatcttcacgttttttagaatttgttttcacataaaaaagagtgtgttaaagtattattgatggtataataagtttaaacaagaaaggatgataacattgggtatctatttaaatccgggtaacgaagaattcaaaaatactataaataaaatgatatatgtagacaaatcactacttattgaaaaaatcggcacttattccaaagctatcaatcaatatatatgtatttcaagacctagaagatttggtaagagtacagatgccaatatgctagttgcctattattctaaaggatgtgattctcataatctattcaatcatttaaaaatatcaaatacagagaattatcaaaaagatttaaaccaacataatgttattcatttgaatatgcaggattttttaagtatgacaaattcaattgaagatatgctgattttattatctgaagaagttatctttgaattaacccaaaaatatccagtaacaacatcaagaaatattctctctttagttttatcaagaattttttcacaatataatgaatcttttatatttattatcgatgaatgggactgtgtttttagagattttaaacaagataaagaagcccaagaaaaatatcttgattttctaagaaatctattaaaagataaatcttatgtaaaaatgtgctatatgactggaattcttccaataaagaaatatggaacccatagtgcattaaatatgttcgatgagatttctatgattgaaccccgttcttactcagaatttatgggattcactgaagaagaagtcaaagctttatgtgaagaatataatgttgattttacaatgatgcagtattggtataatggttatcatctcaaagaaaatatttctatttattcacctcgttcagttactgcttctatagctgatcataacttcctaaattactggtcacaaactgaaacttttgaagcattgaaagaatatattgatttaaattttgatggtttaaaagaagatataacggcaatgatggctggtatgaaagtagatattgatatttcatcatttcaaaatgatatgacaacatttcattcaaaggatgatgttatgacgttattaattcatttaggatatttaggatatgattcgataaatcaaaaagtttatattccaaataatgaagtaaatggtacatttattacttctgtaaaaaattcaaattggaatattgttagtacaatgttaaaaaactccaaaaatttattagaagcaacatggaacttagatgctaaaaaggttgctgaatatattcaagaggcgcattatgaaacaagtatactacagtataacgacgaaaatgctttgtcctatacaatcagtttagcttatattgctgccaaagaattctatacaattataagagaattaccaactggtaaaggctatgcagatattgcatttattccaaagatggataaacctgctatgctcatagaactcaaatacaatcatgatgtagaaactggtattgaccagattaaaaagaaaaactatccaaaaggactagaacactatcaaaataacttgttattgatatcgattagttatgataaaactacaaaagaacatagttgcatgattgaaaaattaggataatcattaatacacttgagtatggattttattcgtgcgctaatgattattattcaataaatcatgcaaataaaatagactaatctattactagactagccccttaccaaaccacacgtacgctatcaacgcatacggcttaccaatttacttaatcaaatgtatttcataaacaatgatatcctatctgctaaatgcataggatatttttgttatatatctcaacgccttttcttttcatcttttcaaatacttttatttgtttttgtttattcttggattgctgcttttccacgtacaatcccaatgaatagccatatatgtgatagaagtagtaccagttcactggtatcagtcctatcttcacaaagaactctatattccatttcacgttcatgccaaattttttctgattgccgaatgtttgtaaaacatacacattctcaatctctgtgttgtgtacatgccaatgatatgaaacttttatcccataattctgacattccaatatgtttcatgaacacttccagtgttttataaacattgaggtaatagttgactttccctctgactatagaattaatctttttaacccattcttctttagttggtattctatttttcatcacatcctaatactgttcctccattatgaagttttattttcataataaaaatctcaaataaaaaccgactatttatcgactcattgtaacaaaaattcatttataaaatcatcttcagcttttaaaacagaaagagagtaacgttctttgttatcaagataaagattcttcatgacatctggaacattacattttctttttaatgtctcatataaaatataaataagatagcaatgctgaatgtctgtattgtcacttacaggaatatcatcattgacatacatatcttcaccaaaatcttcattgcaatgtcgaatataattatatattccaagtatatctgtctgatgttctaacatatcatcaaaagcatctttaacaaattttttaatttctaatgcttctgttttatttaccatgttttctcaccttcttctgaattatatttattgttccatttctattcaactttttgaattgctccaccacatctttacaactatcatacatcaggaaacttgtaagaatattgaatgccttaagattatcattgttgtttaaaacgtgaacatcttcaaatatctttgtttcgtcgttaaccatcctatcacaaccatttacttttttagtccattatgaatatataaacaaaaaaaccttgatataatcaaggtaattttcttatggtgcggatgacaggacttgaacctgcacgccgaagcactagatcctaagtctagcgtgtctgccagtttcaccacatccgcatattaagatggtgacccgcaggcgactcgaacgcctgaccctctgattaaaagtcagatgctctaccgactgagctagcgggtcaaaaaatggtgccggctaaaggacttgaaccctcaacctactgattacaagtcagttgctctaccagttgagctaagccggcttataataaaaatggtggaggttaacgggctcgaaccgctgaccctctgcttgtaaggcagatgctctcccaactgagctaaacctccaaaaaaaatggtgacctgtacgggattcgaacccgtgaatgcatgcgtgaaaggcatgtgagttaaccgtttctccaacaggccacaaaaatggcgcttgaagtaggactcgaacctacgaccgatcggttaacagccgattgctctaccaactgagctattcaagcatctttctttgtgctcaattatattaccatactagatataataatgcaagtctttttttaaaaaaaagaagtcatttttatgacttctatgctaattctccatttttaccccaatgatcatattcttcaatagttaaatattgatttgaaacaggtacttttgtaatcttttcaacatctgccatgagttttttaacaaattcttgttgatactctaaatcaacatgatggaaccattggcattcaattttcatgcaatctaattcttttcctttgaaatacattacttgattatcttcaatatgaatcattagattttcttcttttttgttaggtaagatggaaataagttgacctgcactattctttaatgattgttcttgattaagtgtaagtgtttttgtagttgtaaatttaatatatggcatatttcattcctcccgactgtttattatatatgaattaactcaagaaatatgacgaaaattagtacatatcataagttaattgtcctaatattttaacgccttctttaatcttagcatctgtaggtgttgagaaattcattctaaagctatgacattcttttgtatcatcatctaagaatgcgtttcctggaacaactgctacatttttttctaatgcttttttaacaaataattgcatatcaatatgctttggtaaagtaacccaaataaacattcccccagttggttttgtatactctacttctggatggaaatattttttcatttctgttaacatcaattgacacttatctttataaatcttttgaattgattgaatatgtgcatccatatcatactctgttaaataccttgccataaccttttgcgcccataaattagaatgaacatcacttgcttgcttagcaaccgtaaatttattcacaatttcttctggtccaatacaacaagccacacgcattcctggagcaattatcttagatagactcgctgcgtaaatgaccagtccatcttgatccaatgatttcattgaagggatcgcatcaccttcaaatcttaaatctccatatgggttatcttctaaaatcaaaacttcatactttttagcaagttctaaaactttctttcttacctctagtgacattgtcattcctgtaggattttgaaagtttggtataagatacataaatttaggctttggctgttgtctcaaaatagtttctaaagcttctaaatctaattgaccatctttatactctaccccttttaaaatagctcctagagatttaaaagcatttaatgctcctaagaaactaggattctcacaaataacaatatcaccctcattgcaaagacattttgctgcaaattccataatctgttgtgaaccagaagtaataagcattttatccccgtcttttaatgcttgttcatgtcgattaaaaaatgaagttgcagcttcaatcaaacctttatctccttcagtaattccatattgtaaaacactgattggatcatgacttaaaatatcagctgatattttttcaatttctttaactgggaaagcttcagcagcaggatttccacctgcaaaactaatcatatgaggatcagcagttgcttttaagatctctctaatagctgatgctttcacatttgacattctatcagtaaatacgtatttcattgatattcccccttatctttactagttattattataacctaatttttcgataataactagatatttatgaatacaagcgatataataaaggtaggtggtgatgataatgcaagtcatatttgttgtcttaaacaaagttgattgtctagatgatttattagcacgtttaaagaaagcaggagtaactgggggaacaatcgttgattctactggcatggtgaaatcaattgatgaatctgatgagagttatctattggggtcactacgtttattcttagagaacccacttcctgaaagtaaaacaattttctttattgtgaatgataatcaagttgaattagtcagaaaaacagttgatgatgcagttggaggaattaacaatcctcatactggtattatgtttggtatgccaattagttttgctgatggattaatgaaaaaataaccaaaggacggccataaaatcggtcgtccttttcttttaatcatgagaaatactttccaaaatattatttttaagttcactatatacagcaaatacaatcacaaatataactataactcctaaactgatgactgataatacttgagacaattgaatataatcaagcatattcaaaaattgtaaattggaaagtaaaatagaaagtatagtatagataataaaactgattatataaatcgcaaaagcatacagggtgtaaatcataacaatctgtttctttgtcattcctatagctcgatacaatccaatttgatgtttacgtgctattgctttaatcttacgattcatgtaaactaataaaataattccaaacaccaatccaccaaagaaagaaatgtctttaaaggttatttcttttaaactaataatatgtaattgttgaactgaatttaaatcattatacataacatcaggatatctatctttgatttcaaataattgcttctttaatgtaaattgtgcatcataattattaacatcacaaaatatattttgttcagtatcttttgatatgtatttttgataagtttgcttatttgtaagaaattgatacatacctccactacctactccaaaaaataaacgattttctttttgcgttacatcatcaaaataaattgtaccaacaattttcatacaatgaccttttccgagctctctacttccccaatcatttgtaaatacttctacttcatctcctatatctaatcctttttcttgaatatatgagtcttttttatcctcatcaaattgttttttagtataataacctccactcccagaaccatcttcatgagcattccaaaatcctttaacaataaatacttcatcttcattttcaggaaatcttccttccatatgatgtgctaataaaatatcttcaacgacagcttgattttcataataaaataattcacttgtttctaaataataatattttgattcagactgtaagttaaaattattttgacggtcataaagcagacttttttcttcagtaatatcttgccaataaacctggatatcatgactatgtacaatttgagttgaaacaccctttatttgacttaatgcagtgagctcatcttgagaaatgggatcatcatagtttcctatcgtataatcataatcctcaacataaagtgattttaaatcatctgtataagtatcaatagtataaaataacatcatgttccccataattcctaccatcaataagataataagactaatggaagcagttttattatctgtcaattctcttaaagctaatgaaggaatagtcacttttctaatctttcttaccttatgtttctttatagattgatgaactttacttgtgagaggtatgaaataagcttcaaatgaaggtataaaatttacaataactgctactataaaagaaattgccagctgaacataaaacgtctgattcacaatcatgagaaatgcaccattcattaaagaatgatataaataaagtatagtagcacttaaaatcaaaccacaaacaactccaataattcccgcaataataatcaataacaatccttcatacacaattaatttttgtatctgtttagaggttgcaccaattgcacgcattaacacaaagttttcagttcgtttactgaccgatgaaatcattgttcctaaaactccaataaaacctacaatcacaataacatatctaaaataaagagaatagtcatcatattgatatagtgaatcttcacccattcttttataatttccgccatatgtttccatattatactgaattctatcttcaaattgatttgtaataacactattccataattgtaaattatcttttgaataaacaagggtttgataatttgatgttgggcgattgaatgtaatgaaacttcctaacgatatagaataaatctgtgaataatttttagctatccctactattttataaggtaaagtttgttgatgatttccatcattcactgttaattcaatagtttgattaactttatgaggaatatccaatccaatcaaacgatcttcttctaaaataatctcactcgcattttgaggaaatcttccttcttttaattacaacgctgttaaatctaaagcagtattatctaaagatgtcatttcaccaagggacttcccttgataatttacttcacccacacgataaatacgtcctgatataattgaacaatcttttttaagactttttaattcattttcactttcaccatcaatgactaatccccacttcccataacgtgtatatttctcacgataactaatttcttcgtatgaagcatagaggattgctatgactgatgataagataaatgttgttagtaatgaaacaaatataaatctataaaatttcctttgtctacgaatattatcaaaggctaatttctgaatataattctgtttaaacatgctgatcacctacaatttgaccatcctcaatagtaatcacacgatctgctttattggccatcattgcatcatgagtcaccataacaatcgtttggttatactttctttgagagagttttaataaatccataacttcttcactattttgtgaatcaagatttccagttggttcatcaagcaatattaaagatggttttgaagccaatgctctggcaattgcgactcgttgttgttgtccaccagaaagctcatcaatgtaggctaatttcttttcttgtaaccctaacattgaaataatatcttctacatattctttatcttctttccgtccatctagatacatgggtaagataatattttcatagacattttgactaggaatcaaattaaagaattgaaaaacaaaaccaatttttcttcttcgtaaaatagtcatttcatcttcttttaaatgatataacgaaataccatcaaccaagacttctcctttttgtggtttttccaatcctcccataacatgtaataaagttgatttccctgaaccacttttccctacaattgttacaaaagttccttgttcaatatccaaagaaacattctttagtgcttctacctttgcttcattttctccataacttttaaaaacatcagttatcgttacaaccttttccatatattccacctcctatctttattataagaaaactatcttacacttttatgacaccttgtatttatcattcatttgaaataatggaaaggttatttcaaaaacgactccattatcattataagcaatcactaatccatgatgtttttcaataatttcttttgataaagccaatcctatgcctactccttgttgtttagcagaatgatagaatctttcaaagatatggggtaaatctttttctttgatttcttcaccattattataaataatacatttgatatattgttgatgttcttcaaaagttaccttaatctttgaacatccatgttccaaggaatttttaataatatttgataaagcttcttgtaaccagctttcatcataatagagataagcttcagttttttcaattgttatggaagtagatgtttgttgaatcaatgaatgtaatgcttgtaaagacaattgaaagacttcatatattggtaaatattgaaaatcaaaatcaacctgacttccttgtaattttgctagttttaataagctgttgataagatatttcatcttctctatttgttgttgtgtttctataagataatggtgaggttgttcttctaatagtaattcattataaatagaaacacttgcaagtggtgtttttaattgatgacaaatatcttctattgtttgtcttaacttattcttttctttttgaatggtttcttgatatgctgttgttctttttttcaaaatgacaatttcatcatataataaacctaaatctccatctttaatcataaactcctgatctccagaagcaaaatcaatcacatgacgcatatcagtaaataatgattttaatattctcttagatgaataatacatataaaaaatacataaaacactatctataaataatatttcttttgataaagaaaatatataaatcaataaaagaatgatgatagataccatcattttgtaacgtaatagtataaattcacgattatttgtttccatataacacctcttgattgatacgataaccaatccctctcactgtttctatataagagataccttgataagttcccaatttatctcttaatcgtttaacatgtacagataatgtattatcttctacataatattcatccttttcaatagcctctaataattgttgtcttgttaaaacttgattttgatgagtgactaacatttttaaaatttcaaaatcaattactgataaagataatttttcttgttgaacaaagacttcccttctttttaaatatatcgataaatcaccaattcttaattgatcttgcaaaggttgactacgtcgtaacaaggccaaaattcttgcatagagttctttgatgcgaaatggctttgtcatataatcatcgccaccactgtttaaaccttcaactaacatatcttcattatcattagcggttaaaaacaaaataggaacatgggaagaaagacgtacttgttggcaaagtgtaattccatcaccatcaggcaattgaatatccaagataagtaaatcatatttattttgtaaatactcacgtaatgctatttcataacaatctgcaatatgtacctgatattctttgatttctaaagcttcttttaatgatttagctaatgctaaatcatcttctactaataatattcgactcatttctatcacctatctttattttattatataatggtgacactttgatgacaaagaaaaagaacatcattgtgttcttttcttacgaataatcatctttgcatcataatatagtcctaattcctgacaaattctttgattgagctgagattgtgttgtgtaatattgatcatatgctgatgatagttttcttaatgctggtataaaaatatcattataaccaatattttgaaatacaattttcattttacggttgggataactcataattctccatgaaagtttttttgacatttcatatgaagatatagctgcctgcttataatattcatacgcttcttcgctttctaatttttctttattatccatttggacttgttttatgatgtttaaaatgccttcatttctcatcattttattaataaacataagtattcttacagataaaggaatcttaatcgttacattatcccaaaaatgaataatatcatgataagctttttcttgtatgggtgtttctatttttccctgtaaataaggttcaaaatattggacaagcatttctcctagaaaacctggtaattgttcttttattgcctcggcaatactagtataatcaatcatttgatgaagttgttgcatacttaatgaaccactatcttctaataataattgaaaacattctaattgttgttgatgaaaagataattctttttgtttcttagcaaaaatatatcttaatttagcttctctatcttttccatctgaattaaataccctttttatttcattaacttctaaccctaattttcttaataatataatttcttgaagttttttgatatcgtcctcagtaaattcacgatagccattttcttgcttagttactttaataagaccttgtttttcataatagtaaatagctttctttgttgtatttagctgttgacatacttcttgtattttcataacttcccacctcacaaaaatcttacactatgtcccaagggtgtagtcaagaaaaaaagaacattactgttcttttaagtatttttttgctcctaattgaaataattcaaaacgacgttgagtgattttatcatcttcttcaagccaaaccttaaagataatatctttcttttcatacattattcgacataatgcaagcgcagtgtattgttcttttaaatccaaatgcaaataatctattagtctttgatctaatctcttgttatagtcgtctttttttatatttcccaatgtttttggcaatccgtcatcacagattccattgatacattgaacacagggctgacatatatcatcagcatcgattgttagagaaagtttaacttgatgatttttaataatctcattggctattttatagaaatcatgttgcattttttcatcaggaacaaacacttctattcctgaaccatatagcttaataatgtccataaaatgatgtggctttataataatcattagtttcttaatccttctgttgttattctttctttaattttctgtaaacgttcaatactttctcttgtgaatatttcttcaggatcagctgatccttcctcagctaacatcacaagagaaatccataatagaacattatatatattaattgtctgattatccttatagttttctacacgttcccttgaaatccattcaatttctttcatatgattttctacaaaatcatctaactcattaatataagtataacccatataatgaaatctttgaataagtctagattgagatattaattccgagtctctttcaaacttaaattgaaattcactatgcaatttttctagtacaccattaatgcgtggagatgtattgacatattgaattaatgaattcacattgatatctgtttttaaaactttttcaatatgcacaattcctttattatattcatccacttctttagcaatttgaacaaattcttcatctaataattcaagtgacgctgaaagtcttgtcaaacgacgacgaatatctttaggaatttcatattgtgacttatatcctaacccatgttcaatttcagcccatgaatgttgtaaagttgttcgaatttgtaattcaaaaataatatctttataagcagaatattcaattaattgacatctctcatcattaaacttaatcaataaatgtaaagaattatacccaaaatcaatacgatcatcataattcttttttcttttatcattatactcaataatatcaaaattttgtttcacacattcataaatacgatcaacatcattctcaaacaaagtaataatacgacaggcaacgacatcagttatttctttaatatcttgatacttattcttgtaagtaatctttttcatcaaagcatcttcactcttgatgcgaatagccatattagaaatacgaaaatgatttgtttcaataatacgtgtaaaaatatcatcaatatcatgctttagtgaacgatacatttcttgattatcatgatattgtttgataattctttttgcagaattatgcatgttatcacctcataaaatgattatagcgaacttatatgaaatattcgtgaacaatttatatttatataaagcaaaagagtagatttctctactctacttgaaattcatcaactctttgacctttttgatgtacatagataattccaatgactcctacaattaaaaagacaattgagataagttgagccatacgaataggaccaaacatcaaactatcagttcttaatccttcaacaaagaatcttacaataccataaaatacaaaataactaaagaattgaaccccaatatgtttttgaagctttttaatgacaaagataatcagtaaaaaagcaatcacattcccaatagattcatataagaatgtcggatgatgatatgctccatcaataaacatattattgatgataaaattaggtaaatgtaatgattgtaaaaattcaagacttacatttccaccaaatgcttcatgattaaagaaattaccccatcttccacaagcttgagcaattaatacccctggcatgattgcatctcctgctacaaggaaaggaatattgtgtttcttaaagaaataatagctataaatcaaaccagtaaaaataccaccttgaatggccaaaccaccatgccatacagcaaatatttccattggattagctgcatacatctcttgaaaagtaaagatgacataccaaattcttgcccctataatcccaacaaataacaacataaagaaataatcagataatatttctttatcataaccaagctgtttaaatcgatactgtcctaaaaaatatgcaaaacatgcaccacatagaatcacaatcgcataccattgaatatggaaaggtcctattgatacaaaggttgaaaaatcttcaaaaaatatcatttcgttttactcttgatattgtctaatattctattgacaaactctttactagaatcaaatcctgaatctttcaattgcatattcataacagctgcttcaatgattgcagacatacttctaccaccagttactggcacgacaatttttggtatttggacagttaaaatttcttctgtaacatcatcttcttctacaccaatacgtgtatattcacgagatggcaaccatcgttctaattgaataattaaatcaacattatcttttggtaaaatagaagcaactccaaacatcttagaaacatcaataaccccaattcctctaatttctaataaattctttaatacctctggtgctctcccaacaattccttgaccaatatgatataactcaatcgcatcatcagcaatcaacaaatgacctcttttaattaattccaaggcaatttctgatttcccaattccactatctcctctaatcacaacaccttttccatagatatttaaaaagactccatgaatcaatgtttcagcagcaagtgcttcgtctaaagttccagttaattcaattgatacacgaccagttgcctgtttggtttcaaaaatagggaaattacgttttatcgcaatattttttaatatttcaggacattcgtatcccttcgcaataataatacaaggtgtttcatcatttgctaatttagaaaaacaagcaagttgtgattctttactcatttccttaacaaaggcaatctccttttcaccaaataaaataattcttctaaaatctgtatgcttgaaaaatcctgctaattcaaaaccaggtcgattcatttcagctacaaagatttctctttccaatgattcctcatcaccagagacctgcttatacgtcgaagattttaataaatcctttaattttactgatttacccatatagttcctcctactctaacactttcttaagaaaacgtcctgtatgactttcttcacacttagcgactttttcaggtgttcctgatactacaattgtaccaccattatcgccaccttccaatcctaaatcgataatatgatcagcaactttaattacatctaaattatgttcaatcacaataacagtatcaccttgatcaacaatacgatttaaaacctcaattaagcgtgctacgtcatgactatgtaaaccagttgttggttcatctaaaatataaactgtcttaccagttgctttcttttgtaattcgctagctaacttcacacgttgagcttcaccaccagataaagttgtcgcactttgtcctagttttacatatcctaaaccaacatcagcaattgtttgtagttttgatcgaatacgtggtaaattatcaaagaaatctaatgaatcttcaattgtcatttctaacacatcataaattgtcttatctttatatgtaacttgtaaagtttcttcattataacgtttacctccacattcttcacatggcacataaacatcaggtaagaaatgcatactaatacgtttcactccatcaccttgacaagcttcacaacgcccacctttcacattaaatgagaaacgtcctttatcataccctctcatctttgcttcaggagttttcgcaaataaatcacgaatatcatcaaaaaccccagtataagtcactggattagaacgtggtgttcttccaattggatcttgcgaaacttcaatgaccttatcaacattatctaaacctaaaatatctttatgctttccaggtttttctttagaatgataaagtttagcacgaactgctttacataaaatttcattcaccaatgtagatttaccacttccagaaactcctgttacacaaacaaactttccaagtggaaacttcacattaatattttttaagttattctcttgtgctcctttaatttcaataaagagtccattcccttttcttcttttctttggcacaggaatcttatactcaccagaaagatactttccagttatagaatttggattgtgcataatttcttcaggtgttcccgcagcaacaacttctccaccatgtacacctgcaccaggcccaatatcaatgatataatcagaagcacgcattgtatcttcatcatgttcaacaacaatgacactatttcctaaatcacgcatattgcataatgttttgattaatttctcattatctctttgatgtaatccaattgaaggttcatctaatacataaagaacaccagttagacgtgaaccaatttgagtagccaaacgaatacgttgtgcctctccacctgataatcctccagcccttcttgacaaagttaaataacctaacccaacatcattcaagaatgttaaacgatctctgatttctttaataatcaatcttgcaatatttgtttctgtttcacttaattgtaattgattgataaactctaaggctttttcaatcgacatatcagtaaactcactaatattgattccaccaacttgaacacttaaaacttgttcatttaaacgtctaccttgacaagttggacaagtatgttctgccataaatgaagcataccattccttagaccatgctgaagtcgtttcttcataacgtctttcaataagtgtttttacaccttcaatatattttgttgttttagaaacatttcctgaacttgactcaatagtataactaataggacgatcagatcctcttaagataacctttaattctttctttgtaaaatcctttaaaggcttatctaaatcaatgttatactcacgacataaaaccaaaaatctttgccattcaatacgatctgtacctactgatgtcttaaaatagcgaattccaccctgattaatactcaatgaccaatcaggaatcaataaatcatcatcaacctcatttttaacaccaattcccttacaatcaggacaggcccctaatggattattaaaagaaaacaatcttggttctaatttaggtacactaaatccacaatgaggacaagctaaatgttgtgaaaaaagcttttcagtatgagtatttaaattctcaacaatggcttctcctccagttaattttaaggctgtctctaaagaatcagccaaacgtgaacgataaccttcttttttgacaattctatctaccacaacatcaatattatgttttttattcttatctaaaacaatatcttcctctaatagtcttatttcaccatcgaccttaactctgacaaatccctctttcatcaaatcttcaaacaattctttatgtgttcctttttgatttttacacattctcgcaagaacttgaagctttgtacgatcttcatatgtatcaatcgtatcaaccatttgtttaattgtttgagattctattaaaacatgatgttcaggacaataagcatgaccaacacgtgcatataacaatcttaaataatcaaaaatttctgttactgtcccaacggtagaacgtggattgttagatgttgttttttgatcaatcgcgatagatggtgacaatccttcaatactatcaacatcaggtttttcaacaccacctaaaaactgtcttgcataagcacttaaagattcaacataacgtctttgcccttcagcatagatcgtatcaaaagccaaagatgttttaccacttcctgataaacctgtcataataacaagcttatcacgtggaatctcaacatcaatattttttaaattattgaccctagctcctttaataataatcttatcctttatcatactttttctttaaactccttaatattctctctctatctattccttgaagctgtaaatcataagcctctgctaaaaccttcttcaattgcttatcagccttaaatccagcttccaataaatcgtttccattaatcattggaggttttgctcgatcacccaaacgcgcctttttatcagcaataaactctaaaaaagcatcatactgttctcttgcaactttccccctacctaacttatcacaacaacttatacaaatcaaatcattcaatgaaacttttccatctatcttctttaacaacctcaaataagataaatccctactatgatttctggccatattcatcaaatgcatatgatacataatcattgtagatatatattctcgttcttttttagctgtaattatatccacttgtttaaaaacctcaaccccagcttcattatgcccatgagcatgaccttcttttgtagttacaacaggttttccaatatcatgcaataaacaagaccacataaaccataacggatgatctgttttatgtttcgttaaagcagccacatcaatcactaacatcgtatgattgaaaacatgtccctcaggatgataatctaaacgttgatgagtagtttctaaagctttaagataaggcggtaaagcatctatcgctcttaaaaactcaaatcctaatgatggtttttctgccattaagatttttgaatattcactatagactctttcaattgataaatggtctaacatatgttgtttaaccatttctttacacaattgtaatgtccttttttccaccaacatatcaaaacgagcaacaaattgagcaatccttaaaacccttaaaggatcttcagcaaaggttttcacatttacacaacgaatcacgcgatttttaatatcatcaataccaccacataaatcaataatcttaccttgctgataatcatacattaaagcattcatggttaaatcacgacgttgaatagctttatctaaagataattcaggatcaatcatcacttgaaaatcctgatgtttctcacctgttttcttttctttacgtggcaaggcaaaatcataatgaggtaaacaatcaagctgcataatagcaaacgattgtccaaaagtattcacatgtccatgacgagctaaaacatcatataattgttgatacgtcaaatgatagacttctacatctatatcattttcaccttggattcccataacttcatcacgaacacatccaccaacaatataaacatacccacctgaatgtaaaatatcttcaaagacatcctctgcaagtttttcaaactgcattatttttcacctttcaattccataataatatcacgaagttccatcgcacgttcaaaatccaataccttcgcagcttgtttcatttctttttctaaatcctcaattaatttcttcttagccttcttatcagctttcttacctttttgaacaagagccgttgcttcatcaactgtctctttaccttgaatcaaatctctaatttccttatgaattgtttgtggagtaatatgatgttcttgattataagcttcttgaatttcacgacgacgtgctgtttcatcaagggcttttctcattgaatcagtgatacgatcaccatacataatgacttttccattagcatttctggcagcacgaccaattgtttgaatcaaagaacgttcacttcttaagaacccttctttatccgcatctaaaatacaaacaagtgaaacttctggtaagtcaagaccttctctcaataagttaataccaactaaaacgtcatacttcccaagtcttaaatctcttagaatttcagttctttctaaagtctttgtatcagaatgtaaatatgcaactttcaatccaacttcttttaaataagcacttaaatcctcagccatacgttttgtcaaagttgtaatcaaaactctttcattcttctcaatacgttcattaatctcactaataatatcatcaatttgattcttagttggacgaacttctataatcggatccaacaatcctgtaggacgaataatttgttcagcatattctccatgtgttttttctagttcataatcacctggtgtagctgaaacataaataacttgattaataatcttttcaaattcttcaaaacgtaaaggacgattatctaaagcacttggtaatctaaatccatattcaacaagtgtctctttacgacttctatcaccattaaacattcctctcacttgtggtaacataacatgactttcatctacaatcattaagaaatctttagggaaataatcaattaatgtataaggacgttggccggcttgtctcccatcaatatgacgagaatagttttcaattcctggacacattcctacttctcttaacatttccacatcatgacgagtacgttgatcaagacgctcatactctaaaggtttcatattatcttcaaaatatttcaaacgatcttttaattcagcagatatcgtttcacatgcctttaacatctgttcacgtttcgttacatatccataagcaggataaatcgtataagtatgataacttcccaaaacctttcctgttaaaggatcaacttcactaatacgttctacctcatcaccaaaaagctcaatacggattaaccagctttcagtatgacctggcacaatttcaatcacatcaccacgaactctaaatgttccttttgattgttcaatatcgtttctttgatattgacgatcaaccaaataagtcaataattctttacgatcaatctcttgaccaacacgtaaagaaaaaatcatttctttatattgttcaggatttcccaatccataaatcgaagcaacagatgctactacaattgtatcatttctttctaacaaagaattcattgctgctgaacgcagcatttctatctcataatttgtctgtgcatttttatcaatataagtatcactcttaggaatataggcttctggttgataaaaatcgaagttagaaacaaaatattctactctattttcaggaaaaaactcttttaattctgaataaagctgccccgctaaagttttattatgtgctaaaaccaaggttggcttattcacttgagctataacattagaaacagtaaaagtctttcctgttcctgttccacctaataaaacctgttcctttttcccagctttaattccatctaccaattgttgaatagctgttggctgatcacccattggagaatattcagagacaagcttaaacttttccatttctaccactccttactttattagttcttctactttttgatatccttgatcaattgttttttgataaatatgataagataaagcactcaataaaatcattgaatcattcttatcataaattccatctactttcaaatgataatccttctcaaatgcttctaaagcggtttttgttttttgtgaaaaataaccatcttcacgatcaactggatatcctaattcctttaacttttcttgcataaacaaaacattatcatcaacttgatcaaaatgataagattttttcatttctcccacatgaaaatcaccaatacttttcatcttcacttcataatcaggtttaattcctttaccatttacccaatcaccttttggcgttaaccacttagcattcgtatattttaacactgatgaatcagcaaaaaccttttgtgtttgagcggttcccttcccatatgttttttcaccaacaactttataacctaagacttcttttaatgctgcagtaacaacctcagaagcacttgcactatcaccattaactaaaatataaccatcatcaaatgtatatttttccctatttgttgccttataaacttgttcttttccttgttttggctcaactctaaaaagcacttctccatctttaataagcaaatctaaaatattatgagcagcatctaaatagccaccactattatctcttaaatcaataaccaaatgtttaacattctccttttgaaatgattttaagactccttcaaccaaatcactcgttctttcaccaaaagttgtaattgttaaataaccaaccttttcttttccaacggtttttatttgactagccacagaagtttctacactctctctttttacttttaaatccaattcttttccatctcttaagatatgcaaacttacttcactaccactttcaccttgaatcgtatttttaatcttttcagaagtatatccagcaattgaagttccttctacctttgtaatcatatctcctgccaatactcccgctttagcagcaggtgtattttgatacacttttaaaataagtccaccctcatcaacagtagtaaaggtcacacctattccttgaaaagacccattaacacttgttgtaaaagcagctgattgttcctgtgacaaataagatgtatgaggatctcctagaccatagaccatcccatttaatattctttcttttaaagacatttgactatcagtagtatctaaaaaatcattttctaatgtttgacgtatttcatcatatatatttgtttcttttgatgtcgcaactgatgtttgtgagccacgtaaaaaataacctgctcccatcccaataaccaggcacaaaagacaaccaatcacataaagtggtcccttttttaatttcttttttttcttttgttcatattcaaaattataattatccatatttacacctcgttttcttattttaccatatatttcctcaaaatataactaactaaactcaattattacaaaatcacatcatttttataaagttgattttctaatcaatgacaaaggaaatatatctataatattatgcaacgaaatattttattttctacattatatcacatccaattgcataaatatacatttttatgcaacttttataataaagaaaagcaatccttaagactgcttctttaaaaattgacgaatacattgataactttcttcactgataatatgttctaaacgacaagcatcaacttcagcttgtttttgacttacccctaaagtgactaaaaaatctgttaaagttgtatggcgattataaaccttttcagcaatttgacgacctttatcagtaaaatcaatataacctttttgatcaaccgtaatcaattgtgactctttaaggattttaatagcacgtgatacacttggcttagagaaattcatctcatgagcaatatcaatcgaacggacatattcatttttattttttaacatgagaatcgtttcaagatacatctcaccagattcatgtaaatccattctttcatcctccctcattttcatctattatatcatacttttttatattcatcatcctaaagcaacatctaaaatcatcatcactacaaagccaatcgcaaaaccaatagttgctatgttgctatgatctccagaagaagcttcaggaactaattcttctacaacaacatacatcatagctccagctgcgaaggctaataaataaggtaaaactggaatcacaatacgagataataaaatggtaataaatgcaccaattggttcaacaatccccgataacataccataaccaaaagcttttttctttgaagcaccttcacttcttaatggcattgaaataatggcaccctcaggaaagttttgaatcgcaatcccaatagctaatgccatagctcccatcaaagacacatcattattacctaatataacacctgcaaacacaacaccaactgccataccttcaggaatattatgtaaagttacagctaaaaccaacatagttgttttctttaactgagcttttttcccttcttcttgataatctaaatgcatatgcggaattgttttatctaacatcaataaaaaacctatccccaataaaaatccaatcgtggctggcataaaagcaaattttcctaaatcttctgacatatctatcgcgggaatcaacaatgaccagactgaagcagcaaccatgactccagaagcaaatcctaataaaattttctctactaaacgattcatgctttgacgcataaagaaaacacagcctgcacctaatgttgttcctaaaaaaggaatcagtaatccaataataactgacgaatccatcttccttcctcctttcttttgacataatcatactataaaggacaatattacgcaaaagatgtgcaaaaaaaagaacccgtcagggttctctttcggcattatttagttaattcagcgaaatatttaatagttctaaccatgttagaagtataagagttttcgttgtcataccaagcaactgtttgaacttcagtagttccgttgtctaatggtttaaccatagtttgagttgcatcgaataatgatccataagaaattccgataatatcagaagatactaatggttcttcagtatatccgaatgatggagtagttgctgctttcattgctgcgttaacttcttcaactgtaacttcaccttcaacaactgaagttaagatagttgtagatcctgtaggtacaggtacacgttgagcagaaccaattaattttccatttaattcaggaattactaatccgatagcttttgcagcaccagttgagttaggtacgatattaactgcagcagcacgtgctcttcttaaatcaccttttctatgaggtccatctaataccatttggtcaccagtgtaagcatgaactgttaacatgataccagatttgattggtgctaaattgtttaatgcattagccataggtgctaagcagttagttgtacaagatgcagctgagatgattgtgtcatcagcagttaagatgttttcattaacaccgaatactactgttggtaaatcatttcctgcaggtgcagaaattacaacttttttagctccagcatcgatatgtgcttgagatttagctttagaagtatagaaaccagtacattctaatactacgtctactcctaattctccccaaggtaatttagaagcatctgcttctttgtagatttcgatttcttttccgtctacaacaattgaagattctttagcttcaactttatcagctaaagcataagtaccttgtgctgaatcatattttaataaatgtgctaacattttaggatctgttaaatcgttgattgctacaacttcatatccttcagcaccaaacatttgtctaaatgctagacgtccaatacgtccgaaaccgttaattgctacttttactgccatttctttgacatcctccttgatttattttatgactctattatagtctacaaactaaaataaatcaataaaagttgtaagtaatatataaaaaaattcacaagtttcctaatgtaaacacttccaagcaagaaaagactttttcttacataacaattgacgaattaaacaactttttccatttttaaatcatgaatttccattatttgaataaatcaaacataacattcttcaacctttatcattttatgaataatcaagctaaatcactctataatgaactatggaggtcaaaacttatgcattttataccaacagttattttaaaaaaacaatcgaaagaatatgcttatgatattttctctagattattagaagatcgtattattatgttatgtggtgaaatcaatgatgaacttgccagttctattgtaagtcagctcctttacttggaatcattggataatcaagctgatatttatatgtatatcaactcaccaggtggtagtgtttcagctggactggcaatatttgatacaatgaactttgtaaaatgtgatgtttcaacaattagtatgggcttatctgccagtatgggagcctttttattagccgctggagcaaaaggcaaacgttgtgcattagaaaataccgaaatcatgattcatcagcccctcggtgggacaaatggtcaagccagtgatattgaaattacaaccaaacacattttaaaacaaaaagataaattaaatcatcttctagctaaaatgaccaatcagccacttcgaaagattaaaaaagatactgatcgtgattattttatgaatgcttatgatgcattggaatatggtttgattgatgaagttttaaagaataatcaataaagtcatggataatccccatgactttattttattcaagcatgattgctttaattgaaaggctttttattttttgtgaataaacatacataacaatctcataaatcacaataaaactaaacaaagaaatgaacattgctacaaaatcaaaatgatattgaggaatccctgcaacatctttaaataccaccaataacatcatctgaatcaatccatattgatagattgttcctaaaataaaccccaaataagccatcggacgataacctccaagcaatgccttagcacattccttttgagaataaccagtcaatcgcatcatagatatcgtttttaaatgaccattaatcacagttgttatggctagaaaaagagttgtactggcaagaataatgcctataaccatcatcataactcccatcatttcacttgctagttcattcatcttcattgccatttgggtcatagaagaaaaacaaaaagctgcaaaaataacaaagaatgctagtgtctttttactttttactgttgattgacgtaattctgttaaaaaaggaatatccttattattgttatatttttttgattgagcttttgtaataggtgcttctttcaataatgttaaagatgagcctctcagtttataataactataaacaattgctagtaaagaaaataagacagttggtaaaacaaccaaaaatataaataacaagaaatgaaaatgaatagtcatatctggtaaaatcttatcttgattttgtgttgcataaaaagttggcatcaaccaaaacgaaccaccataaccaagcaagcacccaatcaagacactaaaaccaaaacgccaaaaatgactggcaatttttaaacgtgaataccctaaagcttttaatatacctaattcttttctatgtatatcaatataatgcttaatatagaaaaacaacataataactgacgttaatattaaacatcccccactaataaaactaatcagcttcgcagttgataattgagcttcataaaaaatcatcattccacccattaaaatatcatcctttaaaacaatcaaatccatataataatttaaaaacaaatgacaaacaaaaactgcacaaaaagaaataatcattattccaactaatttcatgacatctttcattccaaccataaactcaccaaccaatctcaaatgctgttttcatcatagcattcgttgagatatgtgaaatctgtccactattgattttaataatggtatgagccatttgagcaatattttcattatgtgtcaccataataatcgtaaaaccatattgcttttgtaatttagaaatataatcaagaacttgtctcccagtttgttcatccaatgcacctgtaggttcatctaaaaataagactcttggttttttggctagtgctcttgctattgaaactctttgttgttctccaccggaaagttcacttggataaagattcatcttagcttttaaaccaattgcttcaatcatctttcgataatcttgattaccaactaaatcagctcccatttttacatttttatccacattcatatgaggtaataaataatattgttgaaaaacaaaaccaatattctcttttctaaattgagttaattcacgatcagaaaataaagcaatattactttcatcataataaatctcaccactatctggaacctctattccagaaacaacatgaagaagtgttgactttcctgaacctgatgcccctaaaataacaacaaaatcaccttcatcaattgtaaaacttataccctttaggatttcattcatagctccataagatttttttacatttttaacattaatcattagcatttcctactttcatttgtttaatcagactcataaataattcagaaatcatctgattgatgtcctcacttgtaaaacgacacatcttcgttgcacataaagttgcaattccatgagtatatatccataaatgttgataaagtttaatcgataacacttcatcaagatgatagctttcttgaatggattggacaattctttgataactctcatcaatcattggtaaaactccttgaatatcaggaatattaacttgttcatgcataaacaataattgaaataactttggttcctgcatagaaaaagatatgtattgctttccaacccccttaaaaggtatggcttctgatagccccttatcaatatattccttataaacacatttagctgcagctataacagcttgctgaacttcttccatattctcaaatatcgtaaaaataggtcttggagaactccctaattgctctcctaacgctctggcggtcaatgcactaaagccttgacttctcacaatttgtaaggccgcttgaataatttcttctcttgtaaactttgcttttggtggcatgataatctctccttttatttaaaacgtatgttttaaaacatctgtgtttattatatgatgaatactacaaaaacacaagaaaaaaaaccaagatattttttcttggtcatcttatcattcttttaattgtacatataaatgctcatcttcaataatcagttcatcaattggtaaatcacaacgataataaagtgcattttctttaaacataacatgatcatcatgaatcaattgtcttaaaacactcatcatattcagttgtaaaaaaagatattcaattttcccattaatattctcaaatgctaattgatgatttctataatcaatcgtaaatgaggttgacatatctaagatccgatcttgatatgtgataacagcactcatataaatcttttcatttatttttaattgtgattctttaatttgaattgaatatttatttaacaatggctttaaaccatattctaaacatgtttgtacttctttttcatttaaaatcatcttatcacccatatattatatgtatctttctataatatatgaatatcctttatcactggatatttttcaaagagatgataatattcaaaatattgattttctaaaggaatccaacgttcttgaaattgtttgatttgtttggaattacgctttgatagtctttcaatctgtaattgtgaatctatttttaaaactacaacatgactataataaggtaataactgaggatgtaaagcatatgttccttcaataatattacgactatggtaagatctatcaataactggttgataagccatttgatgacaatcgaaacgttgataatggactgtttgatgttttgataatggttttaaaactgtttctaaaaaacgttcataatgaacatttccaccaggctcaataaaacgttcaggtgtccttaattcagccggtaaaaagaaatcatccatatgaaaaacctgagcatctaactgctcctgtaaataacttgctagcgttgattttcctgctgcacacatcccatcaatcgccaggataaaacttgactcctgttttaataaaacaattaactcgtctatactcatgttgtttcaccttgtgatttaaccaaaataaatgttgaaagcaaaaccaagatacatccaataattttcattccagttaaactttcacctaaaaataaaataccgacaaacacactcgtaattggttctaaagtcgaaagaatcgcagttaaagaagcacctaaacaacaaattcctttttgaaataaaaccactccaatcaaggaagtcaacactgccacaatcatagataaaaaatatcctttcaaaggcatcaaaacaatactcttggttatcattcctaataagaaaataacaattgaattcatcataaccaaatagaaattaaaaacataaggactcatataacgaattgaagaatgatccattccaatcatataataagcaaagaaaattcctgaagcaacagccaaaaaagccccaaacattgaagcagaagtacgttcaataaaacagaacacacccccaatcgcaagcattaaacataataactgtttcttacttaaagcttgtttataaaacaagaaattaataatacaaacaaataaaggataaagaaagtgcaaaactgtagcacttccaacatcaatataactataagacgaataaagcaaaacaattgttaaggtatttccaatcaaaccaacttttaaaacatctttgatttgttgaaaagttaactttaatgattgtccctgatataaaacaataaataagaacaaaggaacaacaaataaatgtcttaaaaaagccaattgaatcccattactccccattgaataagttaatttacctaccgccggagtaatcccaaaaataattgtcgcaataacagtaaataaaatcccttgttgtttagtattcattaaaaatcttccttatttcttctttatcatttgtttgtgtcattgccaacattaataaaactcttgctttttgtggggttaaagtattccccggaatacaacaatgatggggatcaaagatttcatcttcaaaaacaattccttgggcaacacgtgaacaacgtacaaaaacaattccttgttttgttaaatcctcaatcgctgataaccactcttgactataatttccacttcctgaacctgtcaagataatcccacgatgatttttggctaagtcataaagtaattgattggaagctcccgcataaaaataagcaatcccaacagaagctaaatcatccaattttgcttgtgaaaatcttgaagccaaagtatgaatcttaaatgttcgtgaaaagaaataaacttcatgatcttgcatataacctagacatccaaacgccttttgatcaaaagcatcaatcttaaaattattcaccttttgaatatctctcccagaataaatggtattagaaaataaacccataactccttgatgacgtgcttcatcatgagtagctaaacaaacagcttgatataaattataaggtccatcagcactcgttgcggtagctggacgcattgctcctgtaatgacaacaggtttttctgtatttaaggttaaagttaaaaaataagctgtctcatctaaggtatctgttccatgtgttacaacaactccatcaattttttcatcttgaacaatctcattaatcgtattacttagttcaatccatctttgtggactcatttcattactatcaatattcattaattgatattctttaatatgtgcaatatttttaatcattggaatagattgaataatttcatcaacatccatttcaccagcacgataagcaacagtttttccttgttgaccagtaccagcaatagttccaccagttgcaacaattgcaatcgttttcattatctcaccctttcattcctagatattctatcattttgtccatttgactacaacaataaaagaacactttttacttttcataataaagtgttcctttcatcgatatctcatttccatctttccccctattccatttcttggatgagatagtctttctctaggataggtttaaatgtattacatacctgatcacttgtttcacgcgtaatttcaaataataagataggttcgtattcatcatttaaaactggatatggattatttttaataatatgaagtatgattttcaaatctccatccgcaataacaatatcatgactcttacaaatacgacgtaaaacttttaaagataagttctgtattcgatgattcatgtgatataaattcaacatatgacatcctcctttcgacatattttttataaaatatgtaccctttcttttctacttgtattataataaatctaataaataatcacaatatgcaatatgtaagcgtttatctaaatttagacactttcatgaaaattgtatagtattggaggtggctattaatgaaaaatgaatatcgcaatgcagcccgatctaaagctttaatcaagactgcttttattgaactcttaaaagaaaaacctgccagcaagattactgtgactgatattattcaaagagctaatgtcagtcggggaactttttatgcccattatttagatgctcgtgatttattagaaagttttgaaagagattttattgatcagctgattcgttttacaagaaaacatagagaacctttattagttgataagattgaacttttattatataaagctttagatattttaaaagaagattatgaaacctactgctccttagccaatcaggattttgatttttctttttttaagaatgtaaaagatactattattcatgaattagtcattgaatattcggctgatgaagaaattgaacgtagtttaaatatttatattggtggctatattatgttactgagagaatggctggagaatcccaattttgaatcaatggaagaatatgtacgtacgcttgtacgtttagttcatcaaggaatcatcatataaaaagatggttctttttttgaaccatctaatccaattcttcaccattactttcaataactttcttataccaatcataagattttttcttatatctctttaatgttccatgaccatcattatctttatccacataaataaaaccataacgtttcttcatttccccagtaccagcactgacaatatcaattggtccccaatacgtataaccaatcagatccacaccatcagcgactgcttctttcatcgcttgaatatgttcacgtaaataatcaatacgataatcatcattcactgtctcattttctaaaacatcaacatttcccattccattttcaacaacaaataatggtttttgataacgatcatataactcatttaaaacatatctaaaaccaactggatcaatttgccaaccccaaggagtttcttttaaataaggattcttttcaccaacaataccacctgtatgtcctaagataggcattccatctttataagtcgtagtacgataataagagaatcctaaataatcacttggatattctttaatgatttctaaatcacctggttgaatatctaaatgcacatcatattcttcaaaccagcgttccacataacttggataatatccacgcatcatcacatcactaaaaaacaaagaacgccttcttaattgataagcccctaatacatcttctggtttacatgtattaggataaacaccactaagcgataacatacatccaatatgtgcttccggaatcatttcatgacaaagcttattgactttactacttgcgacaaacatattatgagcagcttggaatttacattgcattggatgatcagttttatcaggtttaattgctgcagcagcaaaaggaatcgtatgcacattattaatttcattaaatgtcatccaatatttcacttgatctttgtatctggcaaaaataacttcacaatatctcacaaagaaatcaattaacttacgattttcccatccgccatattcatcatataaatgaaggggtgtttcatagtgtgaaatagtaacaactggttccattcctaactctaacatttcattaaataaatcatcataaaattttaatcctgcttcatttggttcactttcatctccattaggaaaaattcttgcccaggaaatactcgttctaaaacaattaaagcccattccactcattaattttaaatcatctttataagtatgataaaaatcaatggcctcatgtgatggataatatttcccttcaataacatgatcatcagcttcatacatcaaacctcgtgaaacatcagttacattgacaccttttccatcttctaggtaagctccttcagcttgattagctgcaatcgctccaccccataaaaaatcttttcttagtttcttcataatgtctctcacctcaatacaagtatacttcacatttttttagtgaactttcttttttcattttgtgaaatccattttcaaattcagaaactttaaaattcaagttataagaaaagactgtatatacagccttacttattttgattggtattgatatataacgtaataaaatcatcttccatcaatggtcttgaaaaataatatccttgaataatataagcttgaatttcatttaagaagtcaacttcttgttttgtttctactccctcaacaacaaccgataaatctaaggaatgagttaaatcaataatagccttcactatcgctttactccgatttgtctcattatgtgaatcaaggaagtccatatctaatttgataatatcaactggtgcatctttcaacatattgagtgaagaatacccacttccaaaatcatccattaaaattgtaaatccatgcttttgtaattccttaataatagaataaataaattctttatcatcacaataaacagtttctgtaatttctaattgtaaatttttaggttctattttatatttacgaactaaatcaataaacaattcaaccagatgaggacgatagaaatttaaacgagagacattgacagagatattgatatcaattcccattattttcatcttttgaataaattgacaagctaaatcccaaacataataatccaattgaataatatacccattattttcaataattggaatgaattcattaggtggaataaatcctttttctggatgttcccatctgaccaatgcttctccaccaacaatcaaatgattttgaatatcatattttggctgaatcataataaacaattgatgttcaagtatagcctgttgaatatcatcaaaaatttcttgttcatgtaagatttccaaacgtttttgatcatcataaattcccacttttcgaaaataattattcttaacatcctgtgaagccaatacagcacgatcacacatcaaattaattggcatagaataatcactcatatcaaaaacaccatatcttatagaaattcccatttctaaattattatcttctaacaaatcaatttctaataattctttcatatattctttaggcgtaaagacaaagaacttgtcggcacttaaatgacaacttatcacattgttatattgttgactaatcttttgtaattgttctcctatataaactaataattgattaccaatttccattccatataattcattaacaatcttaaaacgattgacatcaatataaatcatacaaaaatcagcttgttgactatctaaaacttgttttattttatcaaagaaagtttcataattatagagtcctgtcaaatcatctatttcaactttttttcttaaaatatctgcttcttttttatcaataagatgttgtgtatgacgtttatttaatatgattataaaaatacttactaaagtaaaaacaataccagcaaataaaataaagtaacgatacatataaacattatctaagaatgaatattcataacgataaccaattgtataaccatacacaattttatctaattctgcatcattaaaactattaatcgctttatttaaaatagaaaccaactgattatctatttgtttattcgtaaataaatataatgaataaggttctaaagcaatactatgagccgttaaatcatctacatattctggtttttgaatcatataattcatcgtataagcattatttattgttaaatcagccactttatcatgaacagcatctaaacattcttcaaccgttgtataatattgaatatgcgcatgaggatacttctttagaaagtctttaccaatggattcaaaaccaaaattcaatgccactatagcatcatcaaaggtatcaaaaacactttcatttcttgtaacaacaacttgatcaacatttaataaagaatgtgatatccaatatttatcatccgagatatcatctaaattctttaaggctccacaataaatatgataatcttcatctaaaaaggttttcatttctttacgagaattcactggaacatattcaaatttaatatttgtttttttagatattttttctaatatatcaggtaaaataccaactatatttgtatttatattttcataagaaaatggtaataaatcattattaaaaccaatttgaacaaccccaagttttcggatatattcaatttcctggcgggttaataagggttgagttgaataagcactatcactataatatttattataaatgctcatttcaaaataaggagcattctttttgatttctgttaaagcatcattaattttatctagtaaaacctgatttccttctttaactgtaatataaaaaggttgtggatcaaacttagcaacaactttaacctgactatgaatcggtaaacttcctacagcaatcatatcaacttcatgattcattaaagcttgattgatttcttcttcattactataatactttttttgataatcaaagttatttttcattgcatattgttttaaactttgattttgataactattttttaataaaccaatggttttatgattcatcgcttgataatcattaaaataaatgggttcatctaaacgtgtataaacaattgtatattcattaccaataggatattttgaaaaatcaaaatcttgatcacgttctttagtatattgtgcactacataaaatatcaatttcacctttttttaatttttctaaacatttttcccagctatcaaatacataatgatattcccattgtgtatatttagaaatttcatttaaataatcaactgcataaccactataagctcctgaagaatctctttcaataaagcctttataatcaataaaccctacattaatcgtatcaacagccttaactgaaaccggaaaaatcaaaaaagaaaaaagtgaaagaatgataaccatggtgacttttatatgttttttcatcttcatccccaccttgcttatttctaattataacatttcactaatttccaaacaagtcaagttgctttaaagcatcgtttttttatcataaaacaatcacaaacattatctcttttagaacaatacttattcgtaaaaacacaaaagactatccttttgatagtctttcattcatccattaatcacttaaatcttcaccattgctggcaataactttcttataccaatcaaatgattttttcttacttctagaaaaatcaccttcatgattattattataattaacataaataaatccataacgtttatcatattcaccagttgaagcagaaacaatatcaatcggtgaccacattgtataacctaataaatcaaccccatcataatcaacagcatctttcattgcttcaatatgagatcttaaataatcaatacgatattgatcatcaacagttccatcagcttctttcttatcataagccccaaaaccattttctacaatcatcattggaagttcaaaacgatcatagaaccagtttaaactccaacgaagtccaagaggatcaatttgccatccccaatcacttgcttttaaataagtatttcttacaaaatcctctggtacataatcaaatgtcttttcattgcgtccttgatattgtgttgcaaatgacatgtaataagagaagccaatataatcaactttaccttgagctaagatatctttatcttcttcagtaataaaatcataaccttttctttcaaatttctttaagatatgagctggataatgacctctagcatgaacttcaacataccaatatttttgatgcattgcaccaagtgcattcatgacatcttctggattaggtgatgctggataaactgcattcattccaatcatacatccgacttgtaaatcaggattgatttcatgagcagctttaacagctaatgctgaagctaccaattcatagtgagcagatagatacattaaatattcggcatcgtcaccttcttttaataagactgcaccttcttgaattaagttatgttgattgacatctgcttgattattaatttcattaaatgtcatccaatatttcactttatgttgatatctttcaaaacatactttagcaaattttacaaacatatcaatcgcagcacgatttgtaaatccaccatattccttagcaagtgcccaaggcatttcaaagtgtgataaagtaatcactggttcaattccatatttatgacattcatcaaataaatcatcatagaatttcaatccttcttcatttggttcttcttcatcaccacgagggaaaattcttgtccatgcaatagatgttctaaaacatttaaatcccatttcagcaaataaagctacatcttctttataacgatgatagaaatcaactccaacatggttaggataatcttcaccttcaataacaccatcagttaagcggcgaggttcaccagtgacattgtttccagcagtctctacatctgtacaactgattccttttccaccttcttgccaagctccttcagcttgatgagcagcaattgcgccaccccataaaaaatcatttctaaatcccatttttatcatcctccattcctttttttattatactacatttttttaattttcgctgtcacattttcataaaatgaatagaatgatttatactttttttagaatagataatttaatgacatatttttgttcatacccagcaatctcactacagtaatcttcatgatataaaggaccaattgtttttgaataatcaatcatttttaaaaactctggtatacatgttgaaatatcttcatttcttaaaaggaaaaagactgcatagtatcttccctttggtttaatataattagcttcttgtttttcacatcttttaaaagtccacttaaaatcatcaaaacaatctctttcaaagataatcccatattgataaccataattcatataaccaaaaaagaactttccttctggtcttttttctcttatataatattcatcttcaatatcttcttcaaaaagatttaaaaatccatattgttgtagaattgaaaatctttggtttaaaaacaaaagattcttttttatattttcaaattctttaatcttattttcaacaatctgatattgtctttgtaattcagcactttttttcaaaaaatctttttgatcaataagtgcctgaatatcttttaaagacattccaatattttgaaataattgaatagttcccatttgatcatactgataccaggcataataacgataacctttttcattcacataagctggttttaaaagattgatttcatcataataaaataaaacccttttacttacatgacatagttttgcaaattctccacaagtcattaaattttccataaattctccttgactatcacgtaacgtgatagtttataactatagtaacaaagaaaggagttgaaaacaatgtttcaatcaaaaaagatttataaagaagttttcttcttttctattccacttattttaagtatgtttacccaacaattttataatgttgctgatacaatgattgttggtcgttttttaggggttaatgaattagctgcagttggaaatgctggaacaatggtcatgttgttgattgttgtatcaggaggatttgaatttgctagtgaaattattttttctcgttattatggtaaaaatgatttaaaacagattgctagtggggctgtcaatgtcatgagttttgcatttgttatatctattctttttatgattcttggctttttatttttacctactatctatcaatggattcaacttcctcaagaattaatacctcttactaatacttatcttttcacttatatgttaggtgttccttttatttatatttatgatatttcaagagctattttaactgctttaggtgattctaaacattgtttttattttgttttaggatcaagctgtaccaatattattttagatttattactcatctgtgtttgtcatttaggtgtctttggagctgctcttgcaactattgtttctcagatgatatttatgtttgttgcatttttctatctctacacaaaaatcaaagactatcctggttttacattaaaaccacattttcataaggaacaaattcttgagcttatgcatgttacaataccttctattgttcaacaatttgttattacatgttcgtttatttttattcaatctatgattaatcctttcggtagtgaaatcattagtggatttgttgccgtgaataaagtgataacactttcacgcattgtctttttaggttttactcaagctttttctatttatgctgctcgtttgattgttgctaaagactatcaaattattaaagatatttatatctttttagcaaaaatatctttaatctatgtaagtttgatttctctgtgttttttaatcattccacatttattttgtatgcctttcttttctattgatacttatcaaaaaggttacctgttctttaaagtttatttacagtgttcaattccaatgttattgatcagtgtatttaaatatatgaatgaaagtttattaagaagtgctatgcgtatgacatcttttctcatttctaatttaagtgatttatttgtaaaagtcatttcaacttatatcttactttcattcatttctactaatgctttttggttaggagaaactttaggtaaaagtctatcttcaatattatcgtttatccttgtttttataatcattaaaaaaacacatttaaaagaacgcaattaaaatttatataaattgcgttctttttatcactcataaaactaagatagtgttcatattttgattttaccaacgtttcatatttttttcatgtttctttaaataaacttcttccaattcttctggtgatattccataacaaagcattacatcatttaaatacatcaatgtatcacacatttcttcaataaaatgttctctaaccggcatatcttgcatgattgattcatcaccttgttttttaataatatccgccatttcccctgcttcaataaacatatataaaagcttatctttcgcatattgaggttccattggtgtccacttttctttatattttgcttgtaattctttttgtattgtttgcatcttttcaaaatcaaaatgagccataatatcctccttttatccattatacattttctaaaaacaattgtcagcaaaagaaaaaggtcgacatattttcgaccctatttctttaagacatcattccaaccaaccaattgataacctaaagattgatatttatttttaaattcttttgaattgacaagataactatcttccattctttgcatattcatgctgctaatttccataatttcacgatccacaaagccaacatgacatggcatttcaactagatcggcaattaaataatcttctaatctatcatgtgattgcataaaataactttggttaactgcatattcataaccatatccttgctcatctctttctagtcgcattggtaattgatatgtctcacacaaatgttgaaaaagatgtggataatattgatagaaatcataacgatgatgataattgatatgacttggtttttgtcctgtaagtgtttcaaataatgcaatctgattatcaaactctagaatcaattcatgaacatcaacttgatgagtaaaccaccaatctgctttatgaaagcatcctgtttcatcgattaaggaaggaacgtcacatggatttgatactggctttcctaaagtgatattgatatgaatacctacacaagtcatttgatacctttgcatcatatcaattgcttctaaggtttgaggagtattgatcattaaactaattgaagaaattgattggtttaaataagcatgcaagataccataattcactcctgatgttaaaccaaaatcatcagcatttaatattaatcttttagacattgttttgtgccttttgtgcttctaattctttttccttttcaactaatgttttatcatacattttataaaatggtaagaataaaacaacacctaaaggaattgctagagcttgccataatgcaaccatccagtttccttgtaccaaaccatataagacaaccggcacttgcatagagacttgtgctcctgataatggagtgacaattccactcacaaatcctaaatagaagaataagtttgtcacaatcggtaccaataaaacagttggaataaacatgtaaggattcaaaacattaggaactccaaaaacaattggttctccaatattgaaaatagctgctggagttgcaatctttcctatttgtcttaattgttttgatttacagaaaaataacattacaatacaacaacaaatcgttgattgaccaacaacagtcattaaactcatcccaattggattcgttgtttcaccagctaatctcgccatatcaattcctaagaagataggcatcattacccccataacaacattaaatccatgaataccaaatcaccataataattgaatcaatacagttgcgattaaatatccccaaatagaacctcctaaagacgttaatgggatttgtaaataatgataaattaattcatgaatatttccaaaagatgttaaactaaacgcataagcaatcatgccacaaacacctgcacaaataaaccctggaattaatgaggcaaatgattgttcaacatatggtggaacaccttctggcatatgaattgtccatccatttttctcaaataaacaataaactttcgctaccaatacagcaaccaacatagccacaaataaacctttacatcctaaccaaccaaagctataagctaagtctccttcagcaaataaggcacctttaacatcagttgcatagggtgttaaaaccaagaaacaaattaaagaaataataccagtagataaggcatcacacttttcattttgtgcataactataagcaactgcaaaggctgcatataaagcaaataatcccattgtcacattgtaaggaattaagatataatttcctactcctgaacttgccaaccaatctgtccatgctggaattggaaagtttgcaattaaataaaataatgaacttaaaattgtgactggtaaaactcgcatgaatccttttgagattccttgtaatgatttgttattagatacccaagttgaaataggcatcaaaaacttttctaaaacatttgttaaagcttccatttttctccctctctttattttttcctttttatatttaatattggaatttattccaatttaaaccaaattttaataccaacttccattggcattactcaaagcatttttctataaaacaataaacttttgttaaattctctggtgtactaaataatggatccccatgatgagccccttctaatatttcataataaatttgttgtttacaaattgttttggctttattaacaaaatctaaagattgttgataaggcacaatatcatctgctctcccatgttgtatcagcattggacaaatatctttgtgtaaataattttctggattggctctttggactaagtcactattttctaaaataggagcacctataaacaatgattctggtgacaacgaatcatcatgatctggatatttctttaataaccctgatattttgagttgctgatccatgttactaaaattaactggtggaaaccaagcaactaatccttgaattttagtatttgtgtttgatgaataatcatcatcaaattcttcatacttatcaatcaatcccgccatcaatgtcaaatatccaccagcacttcctccccaaacaacaatcttatcagcattcaaatgatacttttgtgcattatctttaataaatcgaatagcttgtttaatatctttaactggttctgggaattgcgcttcaccacttaaacgataattcacaccaatcactgcataacctttatcaagtccatgtaacatatctacaatcatttcttcatcacgcttatcacactttttaaatgcacccccatgaatagaaacaattactggaaacggtccttttccctctggtaaaaagatatccatcgtacaagttttagaaactggactgtattgaacatcaaaatcaccatgataaagattgatatctatctgttttctttctctcatcttctcacctcacaaatacagtataatatactattttccgttttgcaagttatttttggaatttattccattttgttataaataaacgaatccttcccattaattttcatttatattatgaaaaaataactacatctaaaaaggtgtagttatttaaaaatcatctcatctaaaacaaaaccttatatcattaattatcttcagtatgatccataatcaaaaaactttccccaacacgtctaaacgaatgataagatacccatggtatagaagttttttcaaatacttcttctgccctatgaagcaactccattaaatcccaagcaataaaatctatatatccataataaatacctgttgctccaccaatcacactcacaatatcatcaccaataactctttcaatttcttcttgtacatgatatctaaattcaagtacagcttgattataattatcttcaccagcaaaaacatataatggaaaatagaaaaatcctgcaactgcaccatctcgatgaaattcatctacacaaaacgtactattatcaatatagtcaatacttaaatatgcatgtcttgtcattgccacaaaaatatctaatcgcaaatcagcattttcatctttattaggttctaatgaataaaacaaatattcattaagaaattcatctggatcattggataaattgacttcacagttacttatttcatctcttaaatcttttaataaaacaaacttttcattttttggttgctttagtatttggacatcctcaatcaatctcattgcattgatttcaccaagtgcctgatccaaaagcgtattgaaaagccaccatacttccttttcattttctttttgtaataaagcaagtttttcacaataaagttctaatacaaatttcttattttcattcattgtcagccatacttgcacatcttcacctgaaactttttgatcaaaagcagctaacataagtttaggtgtattcccatttcgactgccctccacttgccttcctacaagtatattccaatatttaagaatcgaagaaggggcatgatttttaaaataaacatatttatataaacgagaaatatcaccttctggggttaagattaattcatatttcatcccattaaatccaacttcaaaagaagcattatcaaatgcaacagataaaactttttcaaattctgcaattaaatcttgataatttttatcatctataattgctcgtaaatgtgcttcttttctttcaaacacatcccaacatattgcaactcgtttggcaaatggtttttgaaaacgtggaagtgctaaactttccttacaggcctctataaaattcatggtatcttgatcatttggtcgagattctaaagctttcataaaatgatgaagtgccttcacatcttgatccaaatgaaagtatgcatatgcaatacggaaattccaattatgctgtgaaccaagatcttcctctattgatttcaataattcaatagctttatagaaatattcttctgattcttgtccatcactattttttagattaccaatattattataagcccgagccaattcacttatcagttctgctgtaagcttctctttttctaaactctcaattgcatcaacaatcaattgatattctccattttcattccaaatcgcacacttttctattaaatccataacgttttctccatttcccttttattttaaataaatcttataacaattaaaaacattttcattttaaattatctttcactcatatattttataatttcatcagaagttaattttcttacttgcgtatgatcaaattccttatactcatccactgaaaagataggtgccatttgcgagcaagtcttatctttatttttatctaaatatatttgtaaatcatgcttatcggcaaatatcttataagaaattcttcctttgttgtttttgatttcataaataccacaagcttttttcatggtataatcagcagtgcgtaaataaagctttgctattgataatgattgaaaaggaaaattccacctttgtaatcctctctttggatcacgctcaatacaaatacaacgaccacaagttccacaaatatattgtgtatgattttttaaacaatccaaaggattacgcaagggtgttattcttttttcatcaacataacattcttcacacatttttctcactctttctataatgtcatcacatattcacaatactttatttcatctaaccaaccatcacgccacaatgaatatgtatcaccttcatacatactttctattttctttttccattctcttggacttgaatagtattgcaaatacacatcataagaatcttggcagatattctttaatttatgttcaactattcccattgacaaatgatttgtttttgtaaaatatgagaatatacaatgataatgatgatttattaatacccaaacactattgtgaccggcaacatttggaaaatatttatctttttttagaatatgaaataacgttttataagttgcattatcttttaactgataaacctttatatgatcagtcatatcatcagccatacagacactttgccgattcacttttattttcacattcttcactttctttcataaacactattttttcaaaattcgttttatagaatctaaattaagtaaattgactgtttcaaattgtcctttataaaagactgcccaattgttaaaaggacaaggtagttctttggctttttctaatgtatcaacataaataaaagaaactggttgattttgattgctacaatactcctttatcatattaatatattgatgaataaaaggacattgatcatcataataaatcgttaattcctgattttcaattttttcttttttagcactttgactaaaataagggattgttccatcaaaagaaagggctaataattcatatccactttctgttgtttcaacaacttcaaaaccatattttttagcaaaagattgatctgataaccatgctttttgtctttgagaacctaacatacaaactccagactttccttttgatttcgcatcatccaaacaatattccatcagttctttggcatagcctttccctttttcttctccggttacccataaacaataaatataaagataattttctccaacaataggaacccatgctttttctaatggtgcatattcaataaatacaactgcttttttattcagttttctaaaaacatgtccttcttcaagacgttttaataaccatgctctttttgcttctacaccaggatgaggtttccttgttcgaataatgcaacacagatgttcacttgttagattctcagttgttaaatttataaattcttcattcatatagactcctatcctgctatatcagcatcttcaaaaccactctcaatatttccactgacaataatcacatgtccataaaacaaatcaccatcatcataaaacaattcaaaatccccatctaaagaaacacagacttcactaattgatatacgttttataaaatcttcttcacttatttcatcatcgccttcttcatccgcccaatcattggctaaatctgttaaagactgggcagcatattgtttggctttaagatcccattgacaagaatcatctaataaaacttttaatgaatgtaaagcattatttgctgtttcactttcttcatctttatctaaatgaattaaacattcttgttgattgaagattcctgatccactaaacaatcctaaagatttatctaactttaattcaccacatccatcaggatgaatcacaacatctttttgatattcttttaatatttcatcaagacgtggttcatgacaatttctttttactacttcttcaactttcaaccattttcctttttccatttctttttgattgtatggattgatatatggcaatgattctctcacttttaattgataaattttttcctttgctaatcctaatttctttttagacgtacgacattctctttccgttacaagccattgtaatatactttttctttctaccaattcttgagtcattaaatctatataggcaagagtacgtatacttactgtccataattcttctttgccacttttaccagctcccatatcatcttcagtaagaacgaatatgtctttgatttgtttatcaaatttagcatcaaaatctttttcttcttgtgttaattttcttttaaaaattcccatatttttctccctctttcattttattatatatgaatgataccttccattaatagaaagatatgatcacatttttgacataggccaccaatatagtatttcttttgatgttcatttactatataagttcctatatgaaccttaaatatatcctgtttacaattggaacatttctttattctcaactttaattctggtttttgatgatgaaacaattcaataacatctccacaatgtatacatatcaattgaataacttgattttgttgattaattttcacttgaaattcatgatgaccacatgaacatttagcaacttctatatccaatggttgatctgttaaacttgataaataagtgtcaatatcatcttcactcacttctttccaaccttctttattgctcatggtttcataacaatattttgtgagataaggatattcattgggttgtttatgatggcatcttgcccatgcaagcgcaggaatcgataatagagtttcaaattctaaatctgtttttaatttttttcttcctgctataactgcattgtagaaaggtttagaattaatcaaagcaacacagcgtatatataaaaattcatcagccgaaaagttttcacccttataaatactttgtgctatttttcttgtatctaatgtatataataattcagccatcatttcatcaaatgcaaaaatgagtgtatcacctcatttagcaagcgtttttattaatggttctataatcgcattttcatcttcctgactccaatctaacatatctgtcaaatagaaaaaatcaagtggtgtcatttttttcttataaagaatagcctgaatataaataggtggtttgcctggtcctggcatataataatgacgttcttttttagtctcattatctttcattatatttctcccttatattatctattgttctttactgttaaattataacatttctatgttttatacacatgctttttctaatgttttataaaaaatacaattatatggtcataataaatgataatataaagttcttctcaacactcactttacatattaaatatttttctttcttttttcaaaaatgctatactataagaaataaacaatcacaacttaaaaatatgaaaggaacgtcttatggatatacaacttataaaaaaagaacttatagaacaaatgaaaacacattttaaaggtaatatttatcattggactcaagtatcattttcatatcattcaaataaaattgaaggaagtcgattaactgaggaacaaacagaaatgatttttgaaacaaattcattcatcacaaaagcaaacgaagccattcaaatggatgatttaatagaatccatgaatcattttaagttatttgattatatgcttaaacatatagatgatcccatttccataccaatgattatagaaatgaatacaatattaaaaagaaatactagtgacgaagcaaatccaagatataatataggtggatttaaaatcattcctaatatgattggttttatcaacgccattcatacaaccgccccagaaaatgtagaaaaagaaatcaatgaactcattcaaaattacaataataattcttatatttcttttgatgatattttagattttcatatagaatttgaaaaaattcatcctttcgctgatggcaatggtcgagttggaagaatgatcatgtttaaagaatgtctcaaaaataatataatgccttttattattttagataagtataaagatttctatttaagaaatttaaaagagacttgtttacattgtcaagatatctatgaaacgatgtgtcaaagcttattaaattttaatatcaataaaaaataataaacacagaagaattaaacaggtcttctgtgtttatatcatttttaaagttttaaaatatcctcttttacccattcaataattgcttgcatttcttcatttgtaatatcatcaagatgaatcccacaaacacaacttacaacacaatgatatttcaaaacagcttcttttacatagagatttgctataatgtcatctttatgcccaagttgattccaagtattgaaagtaacatgtatttcatgattcctcatataaggctgtccagtcacaacactaccaatatgaccattttcattataaacatggataactaaatctttacccatccattccattgttcttttgatatttatttttctcatctatgttttcctttcttattatgctatactattcctaaaaggaataggtgaatgatatgacaattgaacaattacaatacttctatgcaattagcgaacataaaacattttcacttgctgcattagaaatgaatattactcaatctgccttgtctaaacagattgctaaacttgaacaagaactaggtgtttttctttttgaccgtagtcatcgtcaaattactttaaccaatgaaggtcaacaacttttaaaagatacaaaaattcttttaaaagattatgaaaagatgttagaacatcttgaaacaataaaagaagataaacgtaatacaattaagatcgcgatgttaccaatcttttcgcaatatgaccttgctcatcgtcttaatgaattttctaaaaatcatccccatgttcatttaattattgatgaaattgaagaacgtgatttacaccataaattagattatcatgattatgatatttatatcttacgaggtgattatgaagaattgcaaacattccgaaaaatgcttttatatgaagataatttagtagccgtgatttctaaaaatcatcctttagctcatatgcatcatttatcaatcaaacaattaaaagatgaacaattgttattgcctccaaaatatacgactatttctaatttagctgttgatgcgtgtcatcaagccaattttaatccccatatcaagcgacatggacgcttagaaactattttaagtgctgctggagaaaatgaaggcatcgcattggttatgaaaaaatcattacatatcttccatttaaatcaagttcaagtcttaccttttagcgaagatattcatggtgatgtttatctttactatgcattagattcaaatcataaacaaatcattgaagaatttattcatacaattcaacctatcaagtatcaaagcagtcactaggactgcttttcatttccaacgtttaaaattattgatttcaatatcaaattgcgataaaacttttcctattaaatgtctttccatatcttcaatactctctggtaaattgtaatatgttaacataggaggcataatcatcacagtatgaatttttgataaatatgctaaattatccaaatgaattgatgataatggcgattctcttgtaactaaaataagtttacgttgttcctttatcataacatcgcaagcgcgtaataaaagattatctgaatatccatgagcaattcctgcaacagttttcatagaacatggaatgacaatcatcccatcaacctgaaatgttccactggcaatgcttgcaccaatattatgattatcataaacaacatctgctaatgaataaacatcttcaatagatatttttgtttcttgaagaattgttatttcagcaccttttgtcaaaactaaatgtgtctcaacatttggattagcttttagttcttttaacaagtgaatagcaagtggcataccacttgcaccactgattcctacaacaatctttttcatattataccaatgccataatatatgtcacccaaagatagcttaatggcatcacaatgaccatggcaggaatcatatcagcaattggaaagttttttagtttaatcattctaaatccagttgctaacatcaagaatcctccacatgctttaaaatccataatcatatctggtgtggttagtggaaagataattcctgcacataagaataagacaaagaaaatcaagaattgtggaattgaaataatcgaaacaacatatcctaagttacatgcaaatatagcagctgtaaagaaatctaaaatagatttagaaataagaatagagttatcaccagtcattccagcggttaaagaaccataaatacctgttccactggcacagaataaaacaataattgtaaccaattgatttaaaaattcttcctcactcatatctgaactatttttaaagattttagctataggtttttgcatgagggttgctccttgattaatcaaatcccctaaatgtaaccataaaccaattgcagttccaataataatcgcaaaaataacagctggcatatttttcattaaaccaattgtactaatccccattcccattgaacaaacaccaaagattaatgaaatctcagctttaaattttggagataatttgtgtccaactaacgctcctgcaatacctccaaataatacagaagcagcattaataataactccagtaggcatatccttttcccctctttcttattcaaacatatctggtaaccaatgttttggatcaacatccataaattttgctctttcaaaacgcgctttttgatcaaatggtacagtacaatcaaaaatagctttgcaagcaacaccacgtgctcttatatgtgaagaatattctggttgatttgatggatctaatggatgacattgtacaccagggattgttattaaatctaaatccgcttggaaacgtgttgtcattgcccacatgacatctttaatatcaaatggatcaacatcttcatcgactaaaaaaacatgttttaattcagcaaatgcactaaaagctaataatgcggcttgtctttggcgaccttcatctgatggtactgattttttaaattgcataatggctacatattttcccccaccacttgatgcacaatatacattttgtaattttccaggcattgctttttctaccattgtcaaaacacttgcttcagttggaatacccgccatagatacatgttcttcacttgggccaatgcatgtttgcatgattggattttttcttgttgtgacagcttttaccttaataattggtaattctggattagctggtccacaataaccaggaaattctggcatagcttttcctgtattagaattgatatcttcacgaatacgttttcctggtaagatttctccttcaataacatattcagcatttgcaattgctctttcttgaattgttaaacattgaacaagttcaactggttcatttctaattgctccagcaatttgtaattcatcataacctaaaggtgttgttggtgcttcaaaacatgaagcaatttcaatggctggatcgactccaatactaattgagattggtaatgcttctcctttggcttctgctagttctctaaagtatccaatatgacgtgctccaggttgtaagaatattgaaatttcatctttagattggaaacacatacgatggatggttacatctgattctcctgtttcaggattggacgcataacacattcctaaagtaatataaggtcctgcatcttctaatgtattggttggagccggaactaattttctaatatcaaaatctggatcatcagcaaaatacttcacttcttgacattttgcttttttattttcaatcacaactggtttgattggattattgactgaatcttttaataaaaaacctaatctttctggttcacaatttaataaatatccgactcttttacgactcgcaagtaatccaatcgcaactcttgctccaggatgacctttgacgttattaaaaatcattgctggtccttccttcgttggacgcattactgttccccctgctccaacatgacgataaacacctgaaagttctcccattggatcaacttcttcattggtttcaaccaattgtccatcaatagattgcaataattctagcgctgaacgtaaatcattcactttcttatttgacatatgtactctctccttctttcttcttcgacatattatcacattcatttatcatcaaacaattcaactttcgcatgcttttattccaaaatggaataaaagatatatttaaaaaagcaatgatagattaaacctctaccattgctcatattttaattttctctttttctctttaaaacagtcatacaagccaatccacttaaaatcatcattgttcccataaacattattgatgtattatccattgtttcaacatctttattaggtttttccacatcgtctgtacctattactgaatcatctggatcaactgaaatatttggtccatctggcttatctgggttatcaggatttattggattcacttctttttcttttaattcatctattgctttttgtagtaatttagctacatcattaacttcttgttgtgttgcatctatattactataaacttcctttgctgtttttaaagcatcattcaatttttcaatagaatcttctgtatatttatcaatattaatattttctgctttattgataatatcttctaattcattcttattagctttagctactaattgactcatagctttatcaagtctttcattgacatcatcaacttctttttgtgtcaatgacttaatatttaaaatcttttgagcttcttttaatgcattaataaattcatctttaccataacttgtatataaatctaaatttatatttaaagctttttctacagttgcttttaaaacttctttatttaagattgttaattgtctatgtgccactaacaagtcatcataagcctttttatattgatcatatgaactattcactaataatgattgagcacttttaatagtctcttgtaattttacataactatctcttgtataaccatcttcctcaatcatttccatatcaattataaaatcatttagttcaaatataattttatattgtaatgcaggtaaagcatttttaatctttttaatcgctactttaacatcatgatcagttgctttttcattatctaatacatctactgcattattcattgcatttttaaaatgattaaaaccaatttcttcatatctttgagataattttaaagtattaagattttgatcatataatttttgtaattctgatttatcaacttcctcaatcttttcaactttttcaaattccatccaatcaaaattagctacccatttatttcccccatctgtatgtaatacaaaataaactttatgcattccagatattggtttttcaaatgttatagatgtttctctataatttgcccatccatttgttgttggaagttgaattgttccaataggttgagaatccatactatctaagtaaatatcagcgcgagaatttgttcctgctgaagaaggattatgtgaataacgaactgtcatttctgtaagtcctgatgcatcaaactgaacattatcataagcaagccatgaattatttcttgtcccacctacatttgttaatttttgtccttgactatcagtagactgttcagtttttaattcaccaccagaccattcaactctatcttcagcttcaatatgtgattttatagcaactttattgaattccatatagtcaatattagcaatataaagacgttgattacttgtgcttccacgcaatacaaaacagatattcattttactatttaatgtttgattaagattaacactagcttcttgataatctccccagcctgttgtttgaggcatttggacagttcctaataattcaccttgactattatctcgtcttatttcaatatgtgaatccaatgcacatttatctgtatgtgttgaataacgaactgttaaagaattcatatttaaatttgtaaaatcaacatcatcaaaagtaatccatgcttgatcatatgttccacctaaatttattgattcattttttaaaccatttcctgaccaatgatcactagcctctgcttctaatctcacattattagcttgaggtaatccttcactaaattgtaaataatcaacatttgcaataaatggtcttgaatcacttgttgaaccatgtaatacaaaataaacatcatgaacaccctttaataaatcagtattctttaactcaactgaaatcaattgataatcattccagctagatccagtatttggtatagaaattgtatcaaccaactctccatcaactttatctaatctaatttcaatttttccatcattacaacatctaccagaatttgaagcataacgaatattcattgctgttgtttttaaatcactaaaatctaatccagcatattttatccatgctccatcatatgttccaccaagattgattgattctgataataaaccatctccagaccaatcatcactcttttcaccttctaatcttttaaaagcatcactaggtaattttaattcactcaaagcaccttcaattttttcaattgcttttaaaagctcactatcacttactgattctttatttaacaatttttctccacttacaatactttcttgtaatgtagcatatgtttgtgatgtataaacattttcttgtataagtttagcttttgtaatgactttctttaaatcagtcattcggttataagagaaatcaagtattaaagcactcattcctccagtggcactattttcaatttctgatgcaagtgctcctacaaacgccttgtcattaaatgagatttcaaaatcaacatcgtaatcatgttcctttgctttcccttcaaaacttaaaacaacggttttatctcctgttttaataactttaggtgttaaaccatcaggtatgttattgaaaataacacttccatttgatacaagatcttcattaactttaccagcaaagatactatccccactcaatgtaattgttgcatttccaacaatagatccatcatcattaactgattcttttaattgagtactagaataagttaatcgatcatcactaaacataactttgatattatctttaactttgcgaatactattattaatgagctgaattgttgcttgatcagttaattcaatacttaagtttccaatactatcatttaatttatgttttattgcttttccatcaaacataatttctactttatttttagctgtaataatagcttttgctgttaatccttttggtacattattaattttaatttgaccagttgcagctaaattatcatttatttcacctttaaattcatttgatttcaaagtaatttcaattttttgattaattgaaccatcatttgcttgtgattcttctaacattgctgtagaatatccaatttcatcattgtcatatgttgatgtatcagcattatcactacttgatgaagctggaacaccattttgtgcccattttgatggtttattacccatttcaaatgatagcgttccacctcttgtaatttctgagtaatcaacccatgtacgattcattgatacaccatttaaagttgcagattgaatatacatattttctggtgaaacatgattagcttcaattgtaaatgtttttccatttcctacatctaaagaaactttttcaaaaaatggtgaaccaatttggaatgttgtatctcctggtgtcattgggaaaattcccatagctgctgaaacaaacatcatagccattgttccagcgtcatcatccatcgtttcaagatacccttgaggtgagagcttatacattttttctttaacggcaccacttgcataacctgtattccatgtttctccagtataaatctgtctcacccaatattgagttttatcaggtctacccgcaaaattaaatagatatggagcatgtaattcaacttcatttgcagcattatgtaacatcgcctgaccattatctggatcatgttcaccaaataaatattgtaaagcttcaagcatttgttgcttaccacccattaaatccatcattccattgacatcatttgaatcataccatgtatattgccacatagaaccttgataaagtccatgttcaccaatttttattggattcccatcacgccaacttccatcagcatttttagtccataataatcctaattttccatcactgaatggtgaatctacagcatcttttctaaataaatttttataattaaatgaacgttgcaagaaatattttgcttcatcttcttttcctaaagcttttgcgattaaagatagtgcccagtcatcataaccatattctactgtttgatcaactctacctggaacataatgaacatcatctttaacaactttattagcaattttctttgcttcttcatatgctctttctaaattatcaatatcagtaaaacctttagctacaccatcagctaacaaagcaacagcatgttcagttcgaacattaggaactggttgtttatcatgtgaccatgtcacaattccataatctaaagcatcagcaattgacttaaccatatctttataaacatctggtaaaactaaaccaatcattggatatttacgataatcatcccataatgtccaagaatcataatgtgtatagtcttttgcttcatgaatttttccatctgtacctctaaaagtacctgttgtacttgttgcattcataggtgtcataaacatatgatacaaatgtgtataaaataattgttttaattcaccagttggatcacttgttttagatgtttcaattcttattttgcttaaaacatcattccatgcttgatcagctctttgataagctgccttaaaattccaatcagaaatttcatgacccatatctttttttgcttgagcaacactaattggtgatatactcacctttaattcaattgcttcattatcttgtacatcaaaatttaatattgctccaatatcattaccttcttgtgaaaatcttgaagttaattttgaatctttccaagttttcacttcttttgctggtttacttgtttccatgtaaaaatacattgtatatttaccagaaccaccaacatttctaccactaaaacgtcctccaatagctgtagtcgtttcattttcatcaatgacatctaaagtagcattacgaatatcagttccatgatatgtataattcaaatcagctaaaatatttacattccctgcttttgggaaagtataacgatgatatcctgtacgctcatcacttgtcatttcagttctgatttttcccatgtttaaatcatcatgtacattgttatctgttccagttttaggtgttaactcagctttataataacctggctttgcttgctctgtacttttttcatatttcatagcgcgcgtttcagcttttggtcttgctgtatattgaacataagtaggtgttactaaaacatccccacctgctccttgtccaccaacaccctcaatacgagtatgtgaaaaaccttgtatttgtgttttcttataatcatatccagcatgatctaaagtattatgtggataagtatctggacttaatttcactaaagcattgggaacaacacttcctggaaataattgtccataatctacttcagtagatacaaatggatctacatatttggtataactttcttctttttcaactgcataaacatttgaggtattaaacgcaaatcctgatacagttgaaatactcattgcagtgacaagagcaccttttattaattgatatttccttttcttcacaattctttcctcccatttttaattttacatagttattttttctataaattcctccttgtttttctaatataaaatttatcatgaaataaaaattcttataagatagattatttgtacattttttttacaaaaattaatacctcaaatttaataatttttgatatacattcacataatcataataatgaccctttaataaaatttttttagcctcataaatcatttcttctaattgctgattattgtcattagataatttataatcagcctttcctattaatgtagctatttggttaataattttatattgtaaactcagtattgccaaagacaattgacaaatacattcttgtatttcatagtcagttacttgattatcatgaataattttataacttttcatcattgcattataaaaatattggaaccctacttcttcatatctatcttgtaaatgaagaattgctaaattattgttataaagaatctctaatttttttctatcatctactatacactcgctcatattttattctcctctttttcttctcatttaactataacataacctctattatctagaaatatacagaatttgttttgcttcttctacaaaaaatcataccctcctcaacaaaaaaacagaccttagtctgcttcttttaatgtttttataattttataaataatttgatctgattttttgataatatctgaaactgacacataaagaacctttttacccttaaatctttctttttcttggatcataatatcattagataaaataatacaacttgcctcataaatatctttcaatttcaatctattctctattcctgctccaccttgagtttcaacaatcacatcaacaccatatttttctcctgataaaacaagtgcttctgctgccaaataagtatgtgctacaccagaagggcaagaagtaacaccaacaattttcatattcatccccctacaactcatcgaattcaatttcaaattcttcttcttttatttcttcctttatttgtttcttctttaataaattaaccataatagctgtaatagtagaccctaaaagtatcgaaaaaaggtatgctaattttccttctacgataggtaaaacaattaatccaccccagggtgcatgatttaagactcccatcataaaagcagagatattcccaactattgcaccaatacaaatagaaggaattactcggattggatcacttgttgcaaaaggaatagctccttcagtaatcccaacacatcccattaataaagaacctttgccagcttgtctttcttctgcactatattttttgggagataataaagtagcaagtcccattccaatagaaggtgtacaaatagctacccctactcctcccatgagatagggaaatgttcccactttagtttgagcaaaaagtgttgcaactttattgattggtccacccatatcaaaagcagtcataccacctaatatcgcacctaaaggtatcttatcaacttgatttaaatttgataaccactttgttaaatgatcaataaacaaagcaatgggtgtcccaataaaacaaataataattaatcctgtaataagcgttccacctattggatagagaaaaatagttcccaatgattttaatgagattggtaattgaatcttcttcaattgtttaaccacatttcctgctataaatccggcaagaattccacctaaaaatcctgcattcacttcttgagctaaatatgcgcctataagtcctggggctaatcctggtcgatcagctatactaaaggcaatataaccacctaaaattggaacaaataatttaagtccaacttggccaatagttgcgatatctcctaaaaatccttccgttggtacactggcagaatcattaaacataatcgcaatagaaaaaagcacgcctcctgcaacaataaaaggaatcatatatgaggttccagttaatacatgttttcttaaaatatcaaaatactttttcattttatacctcacttaatcctgcttcgatagttttcaaaatttcatttttattaccaatcaatagcttgcctataaaatcatcatgcatcaattgtctcattaaatgggatatgatatgaagatgtatattatctttattattttttggaatcgcaattaaaataatcatttttacatattcttcactctctatgtcccacaaaattgaatgttttaatctaccaaaacatatagaaggagctaaaacattatcatccattccatgtggaatagcaattaattttcctattgatgtagaaaacattttttcacgattaataacttcttgataaaacaattcattatcatcaagtaattctgccttctttaactgtttacataaaagataaatagcttcttctttattttgacaatctaaatctacaataatcgtttctttcttaataattccacacattatactacaacctcattttcacatctttgaagaatatttaaaacttctttagaagatgatgccttttctatttctgataagaaatttgtttttttaaccattctcattaataaaatcattgccggaatttgatcttttttatccttacttgctagacaaaaaataactttcacttttttatcatcaaaccaaacagcatttttattaacaattaaactaattgaactattataaacatcactattttcttttccatgaaataatgcaaaataactatctgtcacacaataaaatcctatttttttaatttctttaataattgtttttccataattttcttttacaaaatgattacattccaacaaatgagaactttgcataatagcttcttcccaatccattggtgtatttttaatttcgatacattcttcgattaacaaatcactaactctataaacagatttagcaatacctaaatggttatgtcctaattcattgagaaatatttttaaaactttctcttttatattttcctctaagaaatctaacttcttatttaatgaataatagtcaattgctgtttctttcttttcaaaacctgctttaattaactgttcataatctttatgtggtaacagtggacttacaacaataacttcttttccaaaattattttttaaaggcaaagtagagataatcacatcaatttcatctatttgagaatacgttgataatttataacttggtataacatctataatttttactttaaattcatttgataaataatcatataagagagtagaactcccatatccatgataacaaacaattaatattcttctttcgaaagatatttttaaacgtctcatacttgcaataaaatgaaccgctaaatatgttaattcatctaaatttgtaatttgattaagaattggtacttccttaatcacatcttctaatgtctcataaataaattgatcttttttaggaattgttgttttaacatcatagaataaaactgatccaacaaatgttcttttcacaagtggtggaatatgcttgagtaatccttccatcaataaatgatcttgtgtaaaatctattcctaaacgttcagacatcaattctaataattgattaagaatagattgaatatacaatggatcaattttctctgataatccttcattgtcattgatatattctaataaatgaatgagtgtccctttataataatgatctattttttgatgaatgagtttctcaaattgagatatatcttcaatatattgctggaaagtatccaatgcatcaaaaccaatcattgccggaataggctgttgatatctgcaataccatactagtaaaattaaattagctacaaaccaacgatattcatcatcattcaattcatattcatacttttcacaaagtaattcactatattttataatatccactatcattattggagcaaaactcctatcaataatatctttagcatacaattgataagagttaaggtctttatttttctcttgataaagatataaataatgtgttaaagctctatttgctatgttcaatatatttcgattataattttttaaacaaaaatattcatcatattctattgtaatgccaaattttaataactttttctctaaaatatttaaatcatttttaattgttgatcttgatacttgaaaatctcgacttaatcgattcaatcttaatcgcttatgatcaaataataacattaagatcattaaccccattcgttcttgaactgtgtatacaaaaccatcattatctttaaaaatttgaatatctaaattttttggataaaccaaaactcccttagattgtttttcaatcaagggtagattttctaaactcaaataatcattaattttatctatatcataacgaacatgtctaatattaatacctaaatttactgatatttctttatatgatgtgattatatgatgagtcatatattccaatattctaatcattctcccactaagcatttatattcaatcccttcatattctatatataatataatttaaagttattggctagatgtaatatttgtaaaaataatttacaaatattatatctatttaaaaagcttggatttaataacccaagtcttttctatctttctctctttccagctgcaaattcattaggacagacatctaacacaacacgactaggagcaattaaacaatcttcatgttgacaaacccaacgttcatgttcatttcgtccatccattgtttccccatctttgataatatccccattcacaaaaagataagatacaaaattataaatatactgaatcataaaattatgatctatcccgtgaaaatggacttgtaaatctggtatacctaaaggaaacaatcctgttgtatcaacaaccatatcttcactatcttgaacattaaagaaacgcacatttaatcctccatctaaaaaatgaaaatcaggattataccattggctattcttataagcttcaactggcatcaacttttgtgaatgtggccaatataatgcaatacatgttggaaaaacatctaataaaacatcaatatatttagcaatgatttgacaacgttccatgcgttctagtccacttgccaaaaaatcacttaccataatctcataacaacatttgtttaataaaccttgtggattttcacttgtccagcattgatgaagaaccatatcaggaattgtggattgatcaaaaggaatcatttcagcaatcatcaattgactaggtattccactcacatcttgataatcaacagtgtgtgcttttaatgcaaaacttgataagtcactcgttgcgactttatctacttcaccaaaggcatcttgtaattttttatagagttcttcataaggaatctctacttctttttcaaataataatttgacatagtaaacattggcaaacttttgtgcaaattcctccatatcaattgattgtctcttttcgctcatatactctccctaatcattcctactgaatgtcgcatctcaaaaaataaattgataagactttcataataaggaataaattgaccttccctcattaactctaatatttcttgttgtgatgcccatttgacatcttgaacttcttcatattgtagttgtaattttgataaatcaacttcttgatgaattaaatagatatcatcaaaaccttgctcaaaatgattggttaaacttggacgacaatttgttaaatcaatatccaatccaagttcttccttcacttctcgcatggctgcttgttgactggtttctccttttaaggcactaccgcccatagtcacatcccataaattaggccatccttctttaaaagcttgacgttgttgaattaacatttcacctttttgattaaaaatacaaacatgaacaaccagatgataagtcccttgaggcatttttactcctcttaaatgtgttctacctaatttttgaaaatgtttatcatataaatcccaatattccatattttctccttaatctttgcaaataaattttaaatcaaataaaatagattcttgaacattattaggaatattattcttttgattcatcaaactactcataattttttcttttaattgaggtgatatctttttataaggattccgttgattgattcttaaatgaatcaattgacgcatcttttcataaggatagtaataaagttctaatagataaggtaatctctcccaagaatcttcttctaataaaatcatcaataaatatttagaaagatgttcaatagttgatttttgatatgtttcataaatcaactgtgcaccaaaatgaactttatttttttgaatagattgaaaagctgctttagacaaagagattctctcatccaatagaaaacgccaataaatatcttgacctttctctttcattaaacgactcaaggcttgaattgttacttttacaattctttcttgttcactttctaaataaggtaataaaatatcgatatcttgacttgttccaacttcacttatccctaaaatagctattgatttaggtaaatgatgaatataatactctaaaacattcatttgtgtattttttttaataagaaacgtacatattcacgtattgtataacttctatccaacaaatcattctctatatccttccatagactttgattcatttgataataacataacatagcttcttttctaacataaaaatttggatgatgtaaataagtgaataatttatcttgactcatttcatcactttgtaaaaaactttttgtgattaataataaacaaaatgaatttttttctatatttaataattcttcaatcaattgaaaagataataatccatgttctaaagtgatttgataaaaagctttacgtatacattcatctttttgcattaagttttgaatattcaattcactaagtaaatctgataatcgcttgatataatgcttttcaataccatctaattgagtctgttggcgtcttttagattttttgatttttatgaaaacataagaggcatcaatcaactcatctaatgaagattctaatatccgtctatatgccaaaacataagctttgtcacgaatttcttcaacccaatcattcattcttatcatgataagtgcaagtgtatttggataatgaacaagtatttttaaacacttttctctaaaataaccacttggatgaaaacatcccataaccagtagactaacatatccttccttttgtaaaaagtaatcattcatagatagaatatctacattgttccaatcaattgaccataacatagatgtataactacgccattgttcacctgtttttatgatttgatgaatattcatcgtagaaagataatcattccctattttccctactcttacaatcatatcttgattttgataacttaaggcttgataagcattcgcatataaagataaccaatcttgtggttttttctctaattgttccaaggatgattgaatatattcaggaatcttttttcgtaaaaaattcatcttactaaccttctatatttaaataatgtaataagatttctacaaagatggaataaattggaacactatctaataatgatttatttttaagtggtgcaacacttggcaacaataaaaagatatctgattctttttctaaagatgttgaaggattcatagtcactaatgcaatttgacaccctgtattctcttttaaatcaaaagctgtttttacaatatgactatcagcacttgctgatataacaattaataaatcttgctcattcgtaattaagtctatagctttgacattagctgtgcctggtaaaacatcagcatctattccatacatagctaaagcatattttaattgtaaacaagttacttctgaattgatttctccaacacatctgacttttctagcattttgaatagaagtcgctaaagattttaaatcctcatcttttaaagtataatgcaataatttgattgtatccatatagattttttcaacattgataatctttgcattctcatcttcaatgactctttctgcattacttaaactattgacatatttaacacagtcatatctaaattctgtatatccactataccccatcttttgagtaaatcttaaaatggttgttttcgtaattttaatcttttctgacatttctgttaatgaatacatttgtactttatttaaatcttgtaaaattaactcacaagctttaagttcattctttgttaaagtatttttctttaaattaatatttgataaaaagtccatattgtcctcctatttatatcctttattataccttattattaatatattccaaagttaattttatgaaagaaaaatatttcattttcatttcccccattgactttctttatttttcatctatcatatctttatgggagggaaattatggatcatcaattaaccaaaggacctattacaaagtccttattactattttctttacctatgattttaggtaatttattacaacaattttataatattgcagatacttttattgttggacaatatattggatcaaatgctttagcagcagtgggttcttcttttaccattatgacttttttaacttctattattttagggttatgtatgggtagtggtattttattttctatgttatttggggcaaaacaaattgataagatgaaaacatctttttgtctttcttttatcggtattgcagttttatccattgtgattgagattttatgtttattatgtattcatcctattttgtcttttttaaatattcctagtgatatttatcaacagacttatgattatttatggattatcttttgggggttcttttttacttttctttataactacttttcttgtgttttaagagctttagggaattcaagagttccattaatctttttagctattgcgacaatagttaatattgttttagatgtcttttttattgtgagtctaagattaggtgtgagtggtgctgctctagcaacgattattgctcaggcattaagtggctttgggattatgatttatgtctttttaactcaaaaagatttacttccaacgcgtcaacattgtcattatgatattgaagtctttcaaaagattagagattattcattattaacatgtatacaacaatctgttatgaactttggtattttaatgatacaaggtttagtcaatagttttggagtcttgactatgtctgcttttgcagctgctgtgaagattgattcttttgcttatatgcctgttcaagattttggaaatgctttttctacttttattgcacaaaacaaaggagccaatgaagaagaaagaatacaaaagggattaaaatcagcaatttgtatttctacaatcttttgtttaatgatttcttttggcgttgttttctttgctaaagaattgatgctgattttcattcatcctagtgaaattgaaattattgctcagggtattcaatatttacaaatcgaaggaatgtgttacttaggaattggttgtttattcctgctttatggttattatcgtggagttggaaaacctggtatttctgttgtattaactgttatttctctaggaaccagagtagctttggcttatctatttgccccaacgctaggtcaatgtgcaatttggtgggctattccaatcggttggttcttagcagattttactggaatcttttatggaataaaaaaagaaaattggttgcaattcaataaatagagtatttataaaagataatcatatctttatataatttattatttagttatgataaaataaggtcatataactaatctaggaggaaaactatatgtttaattcattatttaaaaataagggtaatagtattgaaaatcttcttgaaaaagtcaaaacagcagagactcaagactttaatcacatgtttaaagcttactatcaattaggaaaagcatacttagaaaaaggtgataatgaaagagctatgcattatttatcaagagctgatagtttaactatgtctattgatgatatcaatgctagtgataaagaaatggatgaagtttctgatttcattggacaattagaagatgaagatttacttcatttacgtatgttacaagaagtagaagaaaaaagtgagaatttaaactatgttcaaatgtctttatggaatcttttcacactatgtcgtttagaaaaagttttagtcgcatttggaaacaatgaagattgtgaaatattgacaaagattcctgattgtattgatttggtttttaaaatattaacagaaggaattaatgaagaagaaattgaaaatgctcatgaattattaaatgatctttatgatttttctgattcagaagcattctatgctccacaaaatacaatttcactttctcaattgaatgaaccccttcaattatttgatacaacaggaagtgatgctatgaactcattacaaatctttattgatcatgaaattaataatttcttagaaactgaaacttctgatgatttcgcagttgatttcgttgttgcagcattaggcactttaaaaagttattatctacgtactcaagatggagacatcactaatattcctcaaattcaaaaagaaattaaaaatattagagaggattatgaattgttatttaatgaaccatcattagaggacattgaatctaaaatgaaacaatatcgtgaaaatggattattttaaagaaaaaaagttaacatcaaaaatcaaatgatgttaactttttttctttaactatgtaatatttttaaaatatcttcctgactgtttatcataacaaattgctttgttaattgttctaactcttttcgattacagcttctaatcaattgaattgtttcttttgataaatatccaatctttgtctttaacaactctattaacattgtctttttcccttcatttcttccttccctttttccaatgtctaatcctactttttccccaacactctttccttcattaaatccagcttttctattcctttttgcaaataaatccaatgacgtacacataatcattatctctcctaatctttgataatcttaaaaatcagtttaaacagtttttcaatatttttaaaatatcttcctgattgtttatcataacaaattgctttgttaattgttctaactcttttcgattacagcttctaatcaattgaattgtttcttttgataaatatccaatctttgtctttaacaactctattaacattgtcttttttccttcaattcttccttcctttttcccaacactctttccttcattaaatccagcttttctattccttttcgcaaataaatccaatgacgtacacataatcattttctctcctaatctttgataatcttaaaaatcagtttaaacagtttttcaatatttttaaaatatcttcctgactgtttatcataacaaattgctttgttaattgttctaactcttttcgattacagcttctaatcaattgaattgtttcttttgataaatatccaatctttgtctttaacaactctattaacattgtcttttttccttcattaaatccagcttttctattcctttttgcaaataaatccaatgatgtacacataactactttctctccttcctgttctttgataatctttaaaaactttttactattaactatgcttgcaattaaaatggcaacttctttttttacttccaacttaatttcttcttttccattccacctataaaacatctgtattccttggatgagggctctgttatcttcatcttgaaataaatcaacatcaatatccttgatatcaataattcttgcatcccaatcattgatcattcccttatattcctttggtatcttcatcatgtcacttaaacgccttggtccactccatgatctttccccataatagatgactgatgtcatcactggttctagcttcagtttcttcctaccctttttctttttaagttgctttaactgttgattatacatcaatgcatcatagacaaagactcttactggcattgtataatcaattgctttctgattttcaatcgcatttaatacatagataccattttgattatctttcatgattacatcacgattgcgattaaaactgacagtgcccttctttccctcaacaaccgtagacatatccgtatcaacgactgatagatgttcaggtgaaagaacctgctgcccagagaaatagataccattcaaaaaatcagcaaaatgaactttatccctgaaataatcttttaaagttggatcagctttacaattcaacattctacatacctccctttttatagttcaaaactttgatattcatatgaggtatgtccaacaacataatagcataaagcaaattttattcaatacccttctattatatatatacgcatttatttctcgtttttctttttttattttcaaaaaaatgaaaaaaagttctatttacataaaaaatagagcttttcttatttttctaactttaatatgctacatattatcatttgactcttttaaaagaagtccataaaatcatttcaaacttttgaaaacacaattaatcttaaataagatcataacttattattgaatataaaaagattttctataattagatatttaattaaaaagttgatgttcatctcctgatggtaaatgagagaaaaaacaaataaacaatcccaaaattgcacccataaagagaataaagtatagaaactcataagatgaacggtctaatataactccaccaatttgctgagcaatgatagatgctaaactattaaatgtagatactgtagctagtgctgtcatttgtaaatgaggtccaacaatactcataacaactttcatatttaacataataaaaataacagttgaaacagcttttgtccctatcgcaacaatcacttgaatacaacttaatggaatgaaactataagttccaaattgaatgaataataataaaaaaataaaaattaacatgtgacgattagatattctattcatataataacgggcataatagataaatggtaattctgaaagtgtaatcaataaaacaattgttgaaactttatccacactgattccctgactttgaaacatggcaggtaaataagttgtatttaagtttgttattccataaaacaaacaaacaataatcaaataaataataaaatttttattccaaagtttacttttatcctgcttattattcatttcattatctagagttctctcatttcgtgtacctataatcccaacaatgcatataaaaagagacactgaaaacaaaatatacattgcttcaggacaaatatatcgatatacaattccacttatttgtgatcccagcgcatatccaattgttccccaaatacgaatacgaccatattgatgtcttgataaagttgccattctttcaatcactggttttgtcccattaaatagtcctaaagccaagctatagatgattgttataatataaatattatctgcaaaaataaaagcaattcctaaaacagctgtacaagccaaaatcaatccattaacccattttatatgataataatcatttaatcttcctatccaaggttgtaaaataaccgaagcaataaatgaactagaaacaacaaaactgacttgtgaagcattgtatcctttatccattaaatatacagatatcagaccagataataatgctaatgatagaaaataaaataaatacattactaaataacttaaataacttcctttatatttcatcaatttatccatcctttctttaacacaaataaaataacacaagttctctctttccaaaataacaaatcttcattttcaaatacccttcacaattcatttacatttttataaaaaaattgtaaatatcattttcattttgtataataattaggaggtgaacaaaatgttattacaagaacaaatgaaaacttatccattttctaatagtgaaagaatcatcgtcgattacatattacaaaagcaagatgaaatcaaagattattcaacaaagatgatagctgatgaaacatatacatcaccatcaactttaattagaatatctaaaaaattaggttttcaaggttggaatgaattcaaagaaacatttcttcacgaaattaattatttaaacagtcatttccaagatgttgatgcgaatttaccatttacaaatcaagatacaatcatgactatagcaagtaaaattgtaaatcttcatattgaaagtgctaaagatactctatctcttgttcaacatgattctctacaaaaggctgtacagattttaagacgcagtcaagaagtgagagtttttgctatatcaaatttaaattatattgcagaagaatttgtttttaaattaaatcgtattcaaaagaaagcaaatatatctactgtccaagatttgatgtttcatgatgctgccatgatgacatctgatgaatgtgccatctgtatttcttactcaggcgaaaccccacatatcttacaaatgacaacatcattaaaagagaacaacgtgcctattattgcgattacaagtgtcggtcataatcatttatcagatatggcaaacgtgactttaaatataacaactagagaaaaatcattttctaaaattggtggatttacatctcttgaatctatttctattatcttaaatattttatattcttgtcttttttcacttgattatcaaactcatctcgattataaactcaaaatatctaaacgtattgaaacaacacgtttaattgacaatgaaattattaaagatgatttttctaaagaagaatatgaagattaaaaccaagatgttttcatcttagtttttaattatcttatataaattataattcacgaaagactacaattatgctgcttattataaaactcaatttattttcaaatccaacttccatttcttaaactaaacaataaaacatttacttcttcacattctaaacaaaactctagttaaataatttcttattatttccatcaggaattctaaaaaataataccataatcaatccaataagaataattcctaatgaaataaaaaacatattttgataagatgttatatttaaaatttgacctccaatattttgaaaaacaactgatgataaattacgacaagtttgtaccaatgccagtgctgtaatctgatatttcacatcaaccaaagtattcacaaccttcaaattaatcataataaacaacataccagcaggatgtttgactagaaatgttaccaaaacttgtaatggcaaataaacatcaaaagcatatatagcataaagaaaactaattagcgaaaaagcaataataaataattttttatttcctattttacccataaatttatgtgagaataaaacaattggtgcttcacaaagaacagctaatgaaacaataatagaaacaattgaaatatctaatccttttgcttgaaaataagctggggtaaaagtatgggtcatatttgtaacaccaaagaaaatagaagaaataaaaagataataaatatatttcttattcataataatggccttgaaaaaaccttgacttttcttttgagtttcaccatctttttttgtattcgtatttggacttgttcccaataaacctataatagaaataatcatagttaatacaaatgtgacaaagatggcagatggtgaaataaaatcatagatcaatcctgctaattgtgaaccaagtgcataaccaatagttccccatattctaatgcgtccatattgataaggacttattgttgcaattctttccataataggatttgttccattaattaacgttaatacaaagctatatccaatgattaattcaataaggttctttgcaccaataaaataaatcccaccaagcccagccaaagcaaataaaagagtattcactttttttaaacttaatttatcacttaaaattcctatcaatggttgaaataccatcgatacaagaaatgatgttgaaacaactaaagaaacatcacttggtttgaatcctttatctagtaaataaactgatataaacgatgaaaataatgcccacgataaataataaaaattatacatcaaaaaataacttaaataactattcctataacgacttaataaatttataaaaatttgatctttactttcttctataaaagtagttttttccataaattcctcacctcagttatataagatacataaattataatcttgacacaacaaactttatttcttttcaattatcattcacaaatagtagcttatataataacttttttgtgaatgatatttacattttattataagtatcaaagaagatgcatatcttttctaggtctttgcttaaattaagagcatatgaattacaaacaaaaaaaggatttgaaattattgagttaaatcaataaaatcatttcctcttttcaagttcgtgacaaaagtgagaaaatctatttctgatacagagtttcttttattaccctaaatcttctccattactagcaataacttttttataccagtcaaaagaatcttttttacttctttctaatgttccgttaccttcattatctctatctacataaatgaatccgtaacgttttttcatttctcctgttgtaaatgaaacacaatcaatgcatccccatggtgtatatcccattaattctacaccatcttcttcaacagcttttttcatttctttaatatgttctcttaaatagtcaatacgatatggatcatgacaacttccatcttcttctttgacatcaattgctccaaaaccattttctacaataaataatggtttttcatatctttcatagaagatatttaaagcataacgtaatccttcaggatcaattgcccatccccagtctgattctttaataaatgggttctttacagaatgttcacttgaaccatcagttgccttagaaacatctttatgtgaagtagaatcaactgtatttgtcatataataagagaatccgatgtaatcaactgtaccagcagctaaatctttcttatcttcttcagtaatatcaatatggaatccttttctttcaaacatctttaatgcatatgcaggataatgtccacgacattgcacatcacagaagaaccaacgatcatgcatcatttgatttgataaaaccatatcagctggtcgacaagaatatggataaataggtaccatcgcaatcatgtttccaattaagaaatcaggattaatctttttaccaatttgaacagctcttgcactggcaactaaagtatgatgtccacagatatacatagcttcttcaggattatcataatttccaaaatgtgctccactgtttgtccaaccaaaaatatcattcttatagttcatttggttattaatttcattgaacgtcatccaatatttaaccttatctttatatcttctaaagcaaacttcagcgaatttcacaaagaaatcaatcgttttacgattcatgaatccaccatattcttttgctaaatgataaggcatttcaaagtgtgataatgtaataactggttcaataccatattttaataattcgtcaaaaacatcatcatagaattgtaatccttcttcattaggttcatcttcatcaccattagggaaaatacgtgtccatgcgatagatgttctaaaacatttaaatcccatttgggcaaacagtgcaatatcttctttgtaatgaccataaaaatcaatacctacatgattaggataatagtttccttcaacaactccatcagtaataacacgtggtacaccatgagctccagcagtcataacatcagcaacactatatccttttgaagtattcaagactccaccttcaaattgatgggcagctaaagctccaccccataaaaaatctttacttaatgccatataattcctcctttacttgatacttctattatacacaattttcccttgttagaaaattaaatatcactattttgggataattattcctgtttgataggcatcaagtaaaatttttaactgtgtcatttgctctataattttttctccaatatcactatctttaacaagcattctatgttgataaacttcaatattttcactagatgaatgaatatcactattgatttgaaggactctatcaattcccttgaatggtgtatgtgattttaaaagaataccatgtgagttagaaataagtgtatatccagcaatacccgtctccttttgataccttttacaaaatcctccatcaataacaataactttaccatttgcttttaatggtttctcatttaatttaactggagtatgtccattaataatatgacattttttaggatccatttgaaactcttttagtatttgacaacatatttcttcctgatgataaaattgataatacggatttcttttttctacccatactttttcatcatgaatataaattctttcaaatgtttttaactctctcccagataagggtgaatgatacccactccataaataaaacataaaatctatagcttctaaatccctcttataatatgcttttctagcttgttgttcacaatattcaaacaattctttacctttatataagtgctcattgacttttattccagtaaaatgaccatttttgtctattggaacacatccatgataaagcaacatttgattgacacataaatacatactaccctttttatataaaaatttaacatgtgcatttaatttctcactatgcttaaatgcactttgtaattttaaaagaagttcattttcttcatcattcaattcataacaacaatcatcattttctatattatttattttataaacattgtgattaattattatttcatgattatgcacctgatgtaattttaattggtgatccatttgatattctgggtgctttaatattagcgttccttcacacttcaaaagcataattgatattgtttgaagcattgcttctctacgttttaaatatggaaatcttttttgtgcataacgctctaataaacgtaaagatatggcatatctattttctaatattttttcattatgataactaagacaattcttaatcactcttgttatacaagctaaatttccacaacatgcccccatccataaaatatcatgattgccccattgaatatcaatattatgatattgcattaataaatcgataattttatctggtctctcacctcgatcataaatatcaccaataatatgtaattgatcaacagctaaacgtttaatcaaatctgttaatacaattataaattcttctgccatatcaatagaaatcattgtttcaataatatgattttggtattgcttttgtgtatgactatcatgatctctttcatttattaattcttcaatgatatacacataagcttcaggaatagcttttctaactttagaccgtgtatatttcaaagaaagtttttttattaataaaataagataatgaatttgtattcttaaccattgtttatctaataaatgaagggttttaagttgtttcattttctcacaaggataataaatcaatgttgataattcttccatctccccttttgttaaatcttgataaaaatacgtctttattttttctttaatgactcctgaacaattatttaaaatatgcttaaaagcatcaaattctccatggatatctgacataaaatgttcagttcctttgggtaagtttaaaatagattcaagatttataatttctctacatacatctttaatagttgggaattgttgtgctaataattgataatattgtagatcttgttcatcaaatttttgaaatgtcttactcatatagttatctccttatataaagaaaaagaatcactcccacatttgatatgagtgactcaatttcttttagtctattataattgaatatgaatatgtgtttgttcgcaatgatttaacatattggatatttcttttttcatcaaatatatcactttcatctaaacatgttgataatcctaaccatggttcaattgcaataaatgggccgtgattttgtgatgaccataagattaaatatggaaaatctttataatcaactgtcactttatgatgagacttcgatgatgctaaagtcacttttcttgattgtaattgatctagaataattgcatcttcttcaaataattcatgttttaaagggagaattttttgctgattaagtaaagaatgacgcttattaatatcaataagaccagattttgttattggtgtaggaattgtacatgtttcttctttttcaaatttgatgtggtaatcttcatactttccttgttggtcaataggacaattaaatcctgggtgtccaccaatgaaaaatggcatatcttgttcaccaaagttttcaataatataatccactcttatttcatttttaattaaagtatatttgataagtaatttgaatttatatggaaaagcttcataaagttcatcatttgtcatgatcgaaaagacaatataattccattcttgaccaacatattcaaactctttttttctaacaataccatggcgaggcatatgaagctgtttaccatcttgagttatagcatgatcatctctaatacttccacaaatcggaaataatactggtgattgtccactccaatattgtttatccccttgccaaaggaactctatacctaaaggattttttattgatgttaaggttccacctaaagaatcaaatgtaagtgataaatattcgttttctaaataatatttcattttttcacctatgccttattaacgcttccacatacctttatcttattcataacatatttttttacttcttctcgacccttagcattatacttctttggatcaatagtatctggtgcagcatgtaaaacttcattaacacctttagaaaaggcaattcttaaatcagtcgcataattaactttacatattcctctttgaatacattctttaacaacatcatcagggacccctgaagttccatgtaaaacaagtggtatagaaacaaccttacgtatttcacttaaacgatcaacatctacctttggcacacctttataaactccatgtgctgttcctatagcaacagctaatgaatcgacacccgtacgttttacaaattcaactgcttcttgtggatctgtataaggattttgatctccaccatctaaatcatcttcttttccaccaacttttcctaattctgcttcaacacatacccctgaaggatggcatgcttcaacaactgccttacttactgcaatattattttcaaagctttcatgtgatccatcaatcataattgatgtataacctgttcttaatgcttgcatcgctaaatcaaaactatttccatgatctaaatgcataactacaggaacacttgctttttcagctgctgtttttacattggcatagaaataagctaaatcagcatatttgactgttgatggtgttgtttgtaaaataacaggtgaatgtaattcttctgctgcagctacaacagcttgtaccatttccatattttcaacattaaatgctcctatagcataaccacccttttgggcatctaataataattgttttgttgttactaaagacattttctctcctcttttctatagttctttaatttttacatttcttaaaatatctatgcattgttgtggatcaaaacttcctgtttcaggtgatagagcattcgcacttgcaactgccacaccataagccaaagcttcttttggtggatattttctctttaatgcaacagcgaaagctccgaccattgaatctccacaaccaactgtattaaccggttcaatgattggtggtcttgcatgaataacttgatctttcataacaagaatagcgccatctgcacctaatgaaacgacaacatattgaatccctaattgagcaatcttttttgcataatgaataacttcttccattgtattaatctcaacttgaaataaagcttccatttcttctttgttaggttttaccattgttggttgagcttgtaacccagattgcaaataaataccactagaatcaagaataacttctttgccagctgctttaaccatttcaaccatttttttgtaaacatcatttgataaccctttgggaacacttccagaaatagtaataatatcacttttggcaataatttctataaacttatccataaaaacctgttcttcttcagaagtaacaagacatcctggttctaaatattctgtagaaccatattttggatcaagtatattaatacaacttcttgtttctccggcaacatgagcaaaatcatatgcaatattatcttgaacaagcaatgattctagatattgtccattatatcctccaacaatacctgttgctaaaacatcttcttcacataattgaataactctcgcaacatttaaacctttacctccagccgaattacgacaacgagatacacgcataacttccccattacaaatagcttgctccatgtaataagctttatcaattgaagcatttaatgtcactgtagtaatcatatttttctcctatttctcactgtctattaaaatttttcctttaaccattcctggttgtttaaacatttcaaaagcatcagaaatttgacttaaaggcattttcttaaagataaatgaatcatcaaatttcaaatcacctgttttaaaataatgagcaactaacttccattcttctcctggaaaaggtgcactataagacatccatgatccagttaaaataaattctttacgattcatattttcccattctttaaccgaaaatgataattctttagttggtgtaccaacaaaacaaatttctgctttatttgctgctaattcaaacgccattttcatagttattgtatttccagcagtttcaaatacataatcaaaaccacgaccatcagttaatgccatagctttttgcataaagtcatcttctaaagtattaattgaacctgttgctcctaaacgttctcctaattttaaacgttcatcagcaatatcaaagacaacaacatctttagctccaaatattttagcccattgcattacaaacatcccaattgttccaccaccaagaatagcaactcttttaccacctttataattgactctttgtaaaccatgtaacgcaactgttgctggttcaaagaaagccccttgttcaaatgtaacttcattttcaaatttaacagcatttttttcaggaacaacaacatattgtgcaaaacttccattttgtcttgaaccaataaaactgtaatgtttacataatgaataatttcctttttggcaatcttcacattccatacatggaacaagtggtaccccagcaactctatcaccaacttttagtgatgtcactttttctccaacttttgcaatcgttccagagaactcatgtcctaaaacaattggaaaattatgacatgctccttcattaacacgagggatatcagaaccacaaattcctgtatatttgacttgaattaaaacatctcctgctttaacttctggtaaatctatatcttcataacgaatatcattttttgcatgaacaacgcctgccttcattttttattcctcctcataatcagttaattgttgtgctctttttttagaacaacgaattgtaaaaatccaacagattgcataaataactgcaataacaactaatcctgttacattttgtaatgtacaaatttgtgtaaagatataagtaattggacttccaccttgatctaacgctgcaactaaaccgctacttgtagaacctgtagaagttgctaaagctgtcatccaaggaattgtttgattagcaatccaaattgtcatagtcattatggctgttccagaaatcaatgatctaaataaatttcctttgtgaacagcaacagctattgcaataaagaatccaatagttgctaaatcaccaaatggtagaactctattaccaggaacaagaacagcaattaataaagttaatgggataaaaatcaacccaactgtaactacttgaggatcccctaataaaatcgctggatccataccaataaaaaattcagaattaccaaaatgtttcgttaataatgattttgcttgttctgttaacggcattaatccgtccataatacatttaacgatttttggcattaaaaccataacagcagacattttaattcccaaaggtaaagctgctttaacatcgtatcctgctaaaaaaccaattccagctcctaaaattcccccaataacaataggttcagctaaaacaccaactttatcttgtaaagtatcagctgttaaatcaatatctcttaaacctgggattttttcaataatagcatcaacaacgcaagcaattggtcccatataagctgctgttccgtgtggaacagttaacccatctaattcaaagtaatcttgcattaaaggtgcccataaatctccaagtttatatgcaatcatcgcatgaacaataactcctaaaattccaatccaaaattgaccagttacagcataagcaatagctccagtaaaagtcatatgccaaatattccaaatatcaatattaactgtctttgtccatttaagtaataacataacaacattgactaagatagctacaggaatagctactgtcgcaatattagatgcccaagttattggtgaagctcctggccatccaatatcaacaacactcaatgtcaatccaaatctttgtgacattgcttgcgcagcaggtcctagttgagcattcatcatatcaacgattaagcttaatccaacaaatcctaccccaatcattaatccagcacgaatagcttttccaatttttattcctaaacaaatactaataatagcaatgacaattggcaacataacagatgcacccatgtcaataatatattgtataatatctccaaatactcctaacattttttatcccctttctatatgattactttaatacatctaaaatagcttgttcagttttttctacattaacccctgaaataaaaggcataccagtaattaaaggaactccataatctttttttacctttgaagttgtaacaattaaatcagctggtaaatttgaactaatttctgaaattctaatttgacaaatttcgatatcaatattattttttttacataattcaacaactttattagcagcaattgtagaagttgctactgctcctccacatgcaacaataactttctttttcataattctctctccttctctttaataatttcaataatttgtttttgatctttaacttttaataatttttctaaaacttctgtatcttgaataacttgtaaaattctttgtaacctttccaaatgtgcacttggatcaacaactgccaacataaagatgagttgtactttcacaatatcatcatcagaccccatttgaataaaatcaactggttgttttaaaactgcaattgccacacctggtttttttacatgactaacatctgtatgtggaatagcaacccctattccattaacatccaatcctgttggaaattctttttctctagcaattaatgcatcaatataactctcatgagcatagccattttcaatgaatgctcctcccaattttttcatcacttcttggtaatcttgagcttccatatcgctaaatattaatgcttgatcaagttcttcccaaatcacatttatacctccttctatactttaaaagatttgacttaccggtatctcttatcttcatctatatactaacattgatagatacataaaaacagtcaaaggtttttcaaatattttgcaaaaaaataaaacggttgaaaacatttcacaattgtttgatatgttttcaaccattttttatattaatgtatattcgtatttttcgataattctagcaacgtcctcagaagttttacacactctaaggctttctttaaattctttgttttgtaacatattgacaagattaaaaaatgcttttaaatgggttttatgatcaactgcacttaaacagcatacgaactcaactggatcaaattcatcagcaccaaattcaactggatgtttcaatcgaatcaaattcattcccactttaatactacctttttctaatccttcgtgaggaactgcaaaacctggtgataacacaacatagggaccattctcctcaatattatgaatcatagcatctacatagcgttcttctatataaccatattccaataatggctgagctgagagtttcacagcatcttgccatgtatcacattcaacatctaattgaatatgtgttggtggcaataaatgatgtagatatggagaaaatatttcagcatctgcttcaaccgactgatgaaaataatctctcacttctttgcgtatacctttcatcaaatcatcatatctttctggggcaatagaatatatgataggacttaacttttctaataatcctttagcagttatttcagtttcacctattcttgatggtaaatgacgactatttcttaaagcatcaattttatttcctactcttatgtaatcttcatcacttagcagtggtgaaacagtaacataatcaactttactattttttaatggaactgttgatataatgacatctgctttttgtggatcaacattttcagcttcatgagcagatataatatcaacaatttgaaaattaaaatgtttctttagtttctcaattaatagttgcgatgtcccaatcccagcatgacatgcaacaacaacatgaaacgccacttctttattcttttttctttctagtgcagcacaaacatgcactgcaatataaccaatttcaataggcataatttctctagttgaatattgtttaataatatataaattttgattaactgcttcgacaacatcttgattagcctctaagacttcttctaaaattgcactattaggataatctggtgcattagtttttaaaactgattctaaatggttagatagattttcaaaaaaatcataatcatcattcagattaatacctagatcatatgaaatacgatcaataaattgtcttgtaattaattgaatcttaacaatcttatcctctgttgcattttgacgaatataatgtgaatctcgtaaaagttcacttaaaaactgaatttcattttcagaagttgaaatatgacaatattgtgaaacatatcttaatatatcctgcgccattatatatttatcattgttagtcattatgcatgattccaaatattcacccattaaatttctatttaccattattcctaaataaatcaatattttatcaaaagattcatccgtaagaaaactttgatgaatatgttcttgttcattgatgactttttgaattgttattttgtttccagcttgaatacttatatgtcttgcaatcatatcattattgtcttttaattgggcaattttcattaaaaataaacgtttatcactttcttttccttcaactcttaaacctttattaggatgagatttgacttctaaatttgaatctcttaaaaaatctttaatttcagtcaaatcattaataattgttgcacgactcacaaaaagatgatcagctattgttgataacgtaatatatttagatgtattaattaataacacagaagcaaccgcaactctttcattttttgatagcttatacgcatataaatcttgatcagtcataaaaaaacgaatatctacaaaactattatcacgtacaatagttcctccacttttcaattcgatttcttttaaaccattttctcttaatatatcattaatcgaagtcaaatcgttacgaattgttcgttgagaaacattatattcttttgataaatcatcaatggttaccaaatgagatatttcacaaagttcttgaataattgataatgtccttttattcatatcattccaccacctatcttttttctattatagcaattaagtcttttttaactcaatatctttattcattattttcaaatatttcatctataatatttaaaatatctataggtttacaaacagtatactcagcattttttatttcattaggtgcatagccatataaacaaccaataaaaggaatattatttactcttgcggcttctaaatcaaagattcgatcaccaaccatacaagctttctcataattaatattttttaaaatatgtgccaaaacatcttttttggaatctcctttttttaaatacgctatttcatgaaaaaaatcagttaatccaatagattctaatacttttttaatatgttccggatatgcattagaacatatcgccaattgatatcccttttctttcaatcctttcaacatctcttttgttccttcaaaacatcttgcacattgatccataagttcaaattcacttgaaacaatatcatgacgccactcctctaactcactatcactcaaagtaccgaagaactttttaacaatatcctctggtgttaaaccaaaacaagcaataatttcctcatcagtaacttctatttgccatttttttaaagcatttttataggctttaatcgcatataatgatgtttgatttaatgtcccatcaatatcaaaaataacataattcataactatatcctcctattatggaattatcctatcatatcttaaatgaaaaaaaagaataatttctttctttaattttgaaaaaaattattctcttatttaaaataccatccatcctcatcatgataaatcataagtttactcattccaccatcaattttaatattctctcctgtaataaaacctgctttttcactacataaaaacaaaatcatttcagcaatatcttcacaccttcctactcttttcacaggatgttgtaaagcatcaggaccatcgtattttttatcggttgtctctatccacccaggtgaaatcgaattaactctagcaatacctgccaatgaaattgcaagtgcatgagttaaggcatgaattccaccctttgctgctgtatagctttcactttgggcttgtgacattgcatcccttgatgaagaaatattcacaatacttgccccttcattgaaataaggtttcaataacttcacaagcataaatggagcagtcacaccaactcttaaggcatattcaaattcttcataactacattcatcaattcctttaaacaaaggcttagcattattaataatataatcaacatgtccataatctgtaatcactttatgagcaaattgaataagtgtttccttatcactaatatccccttgaaaatattcattttctaataaatcaataagacatacatgtgcccctaattctttaaacatctcagcagtcttttttcctattccttgacttccaccagtaatcacaacaactttatctttaaaatccataacattattcctttcttaagatagactttttttatagtatatcattttatcacatatatcttaaacattttgataataagcaaaaagatatcttaatcctaatacagacaaaatcccataacctagcaaagaaaataaaatttgtaacaatccttgaactgaagaaatatattgtccagcaaaaaataaaggatataaactgattgcatctaatacatgatatcccccatagcttaaaatcattggcatcaaaagaaaagctgtactcataaataaagttagtaaatgatttttagttttcattcctacaacatgaataatcataattataaaaataacagctaagatttttaaaacaaaacttgctaaacaaatcatcccaatagatatccaagaaggaaaaatagcaaagtcttgaatcgatgtcgctgaggcgctcaaggaagcaaatccatatttttgttgtaataaaaataaagatgggaacattgtcatcattagaaaaatgaaacctattaataaagacaatcctagtttgattttcaaaacagattttcgtcctttcaatgtcagttgtgtaacaagattagcatgattttgatattcataactcataacatgcgacatactcatcaataagaataaacataataataatgttggcatgaaagtccatgttgtttcaataaagtattgttgatatgccattggataaacaaattgtttttgtggattcttttggatatcaagatattgttgaaaaactttttgaaaagattgttcaccaatttgttgttgggatatttcttgttgtaaagtgattgcaagagagtaagaaataagaccttttttctctttttgtgaaataagtgataactgttggtttaaattatcataatgtttttgaagtttaagcaaccattgttctttttcatttgttagaggaccttctaattctttcatatattgttgatatatgatttcttcactatcttgataaattggaacataatgatattgataacattgtacgacaatacataaaagacataaaataaaaactttttgaataaaaaagattttataacattcttgttgaaataaagataaagaaggaaaagaaaaatgtttaaaattctttatttcaatattttgaatacgcatatttcttttataatgataagtcatggttgttaaaacaaccattatcaataataaacatactaatccaataaaagtaagtgcttgtaaagaaataagttgatgaaacacatcaatattacgatatatttgaaagaaagtatccgtttgtaaaatagaaaataaattaaaatatttaagcagatataaagaatctaaaggcgaaatgataagatataatccatattcgattgccattataaatatcatcaataccatagttgtgatcttatttttaaatacaattgcacataacaacataagtgttccgattaaacaagctgccaaccattttataaaaataaacaatccaataaattcaataacagtcaaagaataaggacactgataaaactgtgccaatgattgtacacttcttgataaatttcctaatccataaatataagaagcatataataattcactaaccatcatgcaaatcgtaataactccaattattaaaaacataactacacatttggcaaacattgtttggtattgtcccttaggtgttattttgatgatagaaaataacttcttttctttttcgtctataatcaaggatgaagcaatgaccatcattgctaaaatgatcatcaaactagtgatgggaaaactcaatattgaagaaatccctttttcacattcataagtgattggtgtattgattcttgattgataatcattagctgttttttgaatattcttttcttcaatactattttctttatgaaaaatagagatttgagaaatcatatgtgctttcgcttgaatattttcaatatatgaaggataatcatgtaatttttgaaattcattcaaaatattttctaaaaataaagcttcactttctaaatctttagtataaactggctgatgattttctttatagagtttcccatatttttcttcaacatcaggaaaatccgataaaattgaatcaatcatatattgattatcttgaacattcaaacgaagggttgtcaactgttcaatagttaaaaagccttgatacttttcatattctgttttgatatattcatatctttggtgattaggaatagatgctaaatcagtttgtaattgatgataactagaaggtggaattgttgtgtcaagattttgtacataagcgaagatacctatattcacgaaacatagaatgactaagaagataatgagacttcttttttgtatgattttgatgaactcatattgtatcaatttcattatgttcatctccaaacaagtctaaataaacatcttctagagatgttttctgatatttttcaagtaattcactcacattccctaaatcaacaatttctcctttttttagaaaaataatttccttggcaatagtctccacatctgatacaacatgtgttgcaatcaaaatgatatgatcatttgctaattgttcaaaaacatgtcgcaatgaaacccgttcttttggatctaagccagcagttggttcatcaaacaaaagtaactgaggattgcctaataatgcttgagcaaccaataatctttgtttcattccaccagaataagttcgatttcgtcgatttaaataattctccatatgaacaagtttagccactctttcaacttctaatttgatttcacttttaggtatatcttttaaaagtgccatataggttaaaaacctcaagcctgtcatttcctcatataatccttgaagttgtggtgcataacctaacaattgaaagtaatcatttccaagtttttcaatattatgatgattccaaagaatctcgccagttgttggtttcaaaccacgacaaatcaaattcattaaagtcgattttcctgaaccattaggacctaataaagcataaacaccttcttttaatgtaaaactcacatgatttaatgcttggacatctctatatgtttttgataaatctttaacttctaacattattctcgcctcttatcatttaaagttttgatttgttgataatttctttttccttgtaaaaaatcatcaattgaaattaaaccaatatattcttttgttgtttcatattgcatagttcctgcccaagttttttcatcatgtccttcacgatcatacaaaactaataattgatcttttgtttgtgctaaaatattgactggttcttttggtgttcttaaatattgttttaattcttctagctttggattttttaatgaaactttataacttttgataaagttatccttccactcatttaaaataacataatcatcaacaatgaatgtaatattgtagtctttattcttatctaaattgatgacttttgttttttgattcgtttgaaaatcaaaggaatataaaccatctttttttgtgtaataacttttattttgataataatatccttgttcattgagttttactgacatggtttttgttttctttgtttctaaattataagtttcataattatattttccattcataagaatctgatcatatttttgataattcttttgatcaaggtatttttgaggatcctcactataactcattgttgtcataataatattttgaccattcactcctataatatctttatatttcatatccatgatattttttgcttcacctgatttcaaattaatctgatacagcttcttttgcacgacaacactcattatattgtttttcttcatttcaacattttttgttttggttactggaatataaagactctcatttcctaaaactaagctcgtatactcaaattcataaccttcatctaacttacataaatcatgacgatttttaccatctaaatccatttgaataatctttgctgtatcctctgttctctcacctaaactatttattataataccgtaattttgtatcatatataaatgatctttataaacaaaaatcatgtttgataaattaggtggtgctagatacgctgtgcatgattcatctttatgttgacattctggcttatcacataaataaacttcttgtttagaagaataatcataataacaaagataactattttctccatcatgattaatcaaataataaccatcttcattagaattacctttccaaaataaatctcgccagtttttaatgactaaatcttctttcttttcattcttttgtacaacaacctccttttgttttgaattttgacatcctattaatacaatacttaataatactaatactatttttttcatttttatcacccatttttattgtaataagtgaatgtatctaatttgtaaaaaaaacaactttttttacaaagttgtctttaaaacaaattatttatcaaaatataatccccataatcgtgaattaatgacacccaataatgtgacttcaataactaaattgtaagtgtctgtatatcttttatccacgtaacatgatacacgtaatttagcttggtttgactcataaccatattgattataaacccaatcatcaatatcatctaattctaagtattttatcatttgtaaggctatctctttaaattcatcatctgtataattgaatggattctcttgtcttaattcaatatgagttattttatgagtatcggcatccatactataatctactcctttataaggatctggtttcatcctaaagatatgctctaaatcataagtattttgatattctcttatagtcccatattcaacctgatattttttgttgttgttcacttcaagtaattgctgtgatagaattttgaaatcaattaatttttgaatttcattagaaaataatgattgtaaataaagaagttgtttctgttttgtatcaaaatactcatcttttcttttgacgacatatgtttcactcttagcatcagctgtatagtcttgttgatgacgatataaattaacaataatcggatgtttttttaatatttcttgcgtttgattatcttctaaagaaatctctttattaatctcttttaaatccaataatttagaaatacctataggaaggatgagcgatattataagaaccataattccaaacattcttatcttctttttattcatgtgtgacaacccccaattcaaagcttactgtcgttccaacacctaattgtgattggatggataatcctgtatgatgaacatcacatatacgtttcacaaatgtaagtcctaatccagcaccacccattgaacgtgcacgtgacttatctgccatataaaaagcttctgtggctttcttcacatcttcttcactcattcctataccttcatcaataactgaaatcttgaccttatcatgaaaaacatctgtctttatttgaatcctttgtccttcttgacttgcttttatagaattatcaattaaattacgcaacaacataaataataaatccgcttgtgaaagaacccaaatatccaccttatcaaactctaatatattttgaatatgtttcccttgataataatcttttaattgtttaacaataaccttcattgatactgattttaattctatttgattatttcctaaagccagtaaatccatcaatgtataagaaagattttccaaacgttttccttccgtataaatatattgagcagccttctgacgtgtttgttcatcacaatcacaagttcttaataaatcagcaaagcctaatattgcagtcattggggttttgacttcatgcgaaaaactactcatgaattcttctttttgaataacactttcttgaagctgatgaattgttttttcattcatgtctgccatttcatcaaaactctttgataattccccaatttcatcttcactttgaatctgtgtacgttcactataatcaccacttgcaatacgttgagtgacgacatttagtttattaatcgattttgttaagtatgatgaaataattcttaatattaaataagcgaccaaaaacaaaataccactaatcactaagaaattcattatttgacgatcacgctcttgataaactgatgtcaagtcataacatgatgttaaataataaactgtatctcccgcattaatttgtgatgtcataaacatgaagtatttttcatctctatgtttaataaaatatttttgattatagtctatagatatatattctttatatttttcatcaatggtactatagaatacttcattattaggtaaacttaaagcaaatgttttttgattttgagaagcgtattgaaattgtcctaaataatagattgctttgttcatcaaataatgttcatctttttcaaaagctctttgatatccaatagagtcttgataaagacgtgtttctaaagaatataattctatttcttgtgtggttaaatcgtgatcaatagttgtttgtaaaagattatgatgattttgataaatcataatagctgaaccaatagaaaataaaacagcaagtgttaataaacaagaccaaataattttctcagcaaatttcatcattaacctctaacatatatcctactttataaactgttttaatttccttataccatcctaattttttacgtaatctttgaatatgtaaatctaatgttctggtttgatcatactcatcttcatgccatactttttgatataaaacatcacgatacaaagctacatttttatttctgactaaaaataataacaattcatattctttatgagttaaatcaatttgtttatcatcttgataaacacacattttctttgtattaataatcgtatttaatatatgaatttcttccatacctttatgatatcgtcttaatacactttcgactctggcaattaattcatctattgaaaatggtttcactaaataatcatctgcacccatatgtagccctttcactttatctttaacgcttcctttggcagtaataaaaatcacaggtatattgaatggctcaatatactccattaattcataaccattcacttctggtaacatgatatctaataaaataagatcatatgaattgttttctattttatcagctcctattctcccattttctgcataatcacattgatatcctattcttgataaattcattataattaaatccgcaatagctctttcatcttctactatcaatattttcatttctatcatctccaccataatcatacctagaagttgtatctttattgtatcacaaaagaaaaataagagaaaatttctcttatttaaaaactcttgttgcttctacagcttttaaccagccttgataatattttttacgtaaatcttccttcatagatggttgatatgttttcataatagaatgcatcttggcaatttcttcttggtgcttccaaaatcctactgccaatccagctaaataagctgctcctaatgctgttgtttctttaacttgtgggcaaacaatagatgtatttaaaatatcactttgaaattgcattaaaaagtcattagatgttgctccaccatcaacagaaagatgatctaatgtaatatgagcttcttctttcattgtttcaatgacatctttactttgataagcgattgattctaaggcagcacgaacaatatgattgcgtgatgttcctcttgttaatccaaacattgttcctctggcatcattatcccaataaggtgttccaagtcctacaaaagccggaaccaaataaacaccatcattatcatttaattgtcttgccatattctcactttctaaaacattatcaaataactttaatccatctcttaaccattgcataacacttcccgctacaaataccgaaccttctaaggcataagtcacttgtccatcaattccccaggcaattgttgttaataatccattctttgatgaaactggtatattccctgtattcatcaacataaagcaacctgttccataggtattttttacatctccatcatgaaaacatgtttggccaaataaagacgcttgttgatctccagctattccactaattggagctttaaaatgaagtcctgttagaagtgtttcatcactatatccgtatatatatgaagaatccttaacttctggtaacatacttgatggtatatcaaataaatctaaaagttcttgatcccattttaattcatgaatattgtaaagtaatgttcttgaagcatttgagtaatcagtcacatggacttttccccctgttaatttccaaactaaccaagtatcaatagtcccaaacaataaattatttttatctttgatttcgacacgatccaatatccatcttattttacttgcactaaaataaggatttattaatagtcctgttttcttttgaataaactcactatacccttcatcaatcaattgatcacaaatatcatgtgattgtcttgattgccatacaattgcatgatagataggttctcctgttattttatcccacacaactgttgtttctctttgatttgtaattccaattcctttaatttgttctggtttaatattattttcgataaataagctttgtacaacttcaatgaccgtattccaaatttgttttgcatcgtgttcaacccagccaggatgaggaaaatattgaggaaattctctttgtgatacatatcttaactttccttgatgatcaaacaaaatagcacgagtactggttgttccttgatcaattgataatataaattcttccatagttttcttcctttctttttctattatatcaaactctacaagcgctttctataataagaaaaaagaatagaattttacttctattccttagttaataagcattgatttaattggtgatattcccaatgtttttcaacaataccctcaaaaagaattgccaattgttctaaagtacattgtgctaaccaatctggtgctatttggtgatatgttaaaagtatcaatgattcaatatgtgtaacttttgaaactctttttagttcatctactatcatttctatttctcttttccatttatgactttttcttttaattccttatatccaatatctgtcaaaataaattgaataaatatatcaatttgttctggactacattcctttagccactctccatcttgatgatatttcatctcatattgtcgctttgccatttctaacttgccttctgatagtccttgttccaatccaactttctttcctactagaagtccttcttctaatccagacttcttggcatattctacatctacatcatgccattcctgaaaatcatactgcacctgatatcttgcatccacttcctttatcttcttatccttgataaacttcacgacgacatcatcacctttcttcaggatactaaattcatgatcttctctttaagttcacttgattctatatctgtcaatatcagttgactaaaataatctaattgttcttgcgtgcattcctttaaccactctccatcttgatgatatttcatctcatatatacgtattgccatttctaacttgccttctgatagtccttgctccaatccagccttcttagcatattctacatctacatcgtgccactcctgaaaatcatactgtacctgatatcttgcatccacttccttcaccatcttcttatcctttataaacttgttgtatttcttcttcatcatcttaatcatcccttccttttcttcatatttgattccttctacatttccattctccattaaataaatcaatgcttcaaattcacttagacattctttttcactggctattttattgacataaggaagatagacatagattgttgtctgcagatatcccagctgtgaaatattgtatgtattcttggcatagaaatcatccatcagtcttggacaacgcttatcaatatctctgatgaacacaatctgaatcagttccttcagttttcctgatgtatctcctgcttccagctgatagtcaatcagacgacaggaataatgtatgaagcgtctattgagaaagacgctcatcttggaattctgcatttccatatcaatttcatattggttgttttgcatatgaatatccaagatattgtttttcatacgaatcatctgaggtgttagttctggattcgccacacttaaatcgtgaatcgggacaaggggaatgatatttttcaaaagaaattctcttaaccgcttggattcactggtattttgaccaaaggtcagtttaaaaaagacatctgatacataataatttttttcactcataaattaaccctcctacttatatatacgctaggaaagtctcatttttctttttttattttcaacttttttcatttttattatatatttgctcaaagtaaatgtcaatgtaaagaaaaataacagttttcactgttattgaaattgttctttttttacacgttttaaaatttctattgctaccattccaacaaaaatacctgtaggaatagaagatgccaataatacaaagatatatgacataatagcttgcgaagataacaaatatgctacaacaagaacctgtccaatgttatggaacacagcagcaataatagatgttgatataatcggcagcgaagtcactttctttaaaacagccaaagccaggctacttaataaaacccctccacaactaatgaagaatgggtgagacaaaaagattcctgtcattaaacttgatacaacaactctaaagaaattaacaataaacatttcttttacaccatataattcaatcacaaccatagaaataatattagctaaccctaatttcatccctggtggtaaaggtaactgtaaagccgtttccgtcatatgtaaaacaatcgctatagcactcaataatgccatataaaccatttttcttgttttcttatgccccatacatatccctttctacccaatatagtccaaagcacgtcgtcttagtgtctcatattcttcatgtgtctttggatcacttggattaattctatcaaaagaacgatttacccaatttttttctttaacatactgtaaactctttaaaaaatgaagatcaaaaataaatgcaatatatgataaccacatatccaaatgagttattctatttggtccatagattaattcttgatgataaaattggtcatatattttaggtgaaattgtttctttattcacctcatcataagaaacataaattgttgtttcaagatcttcttcctctttaactctaaagttatccaatttatcagcatcacgaataatatgaataaacaataaagttctttcatcaaaaccttcatctattttatatttattatgctgttcaatagcattcttaataattctatcatattgagaatcatcaataaactccctaatcaaaccctcatcaaacaataattgactagaaaataaagcatgatcaattgtcttataatcagcaaagctttgatatctcatccattgttcaaaacgaccaatatcatgaagtaaagcaattaatgcagctaactccttatcctcttgatttaatcttaactgctcacataaataatcactgcacttcatcacttcataagtatgaacaatttttaaacgaatagatgggattgtctcatcatattgagaaatatatttcttaaatgcttctgttgccttttgaaaattaatcatgatgtatcgcctccaataatgcattcaattgatttgctggaatttgaccaggtgctgaagcttgatgcccacttgcaaatgttattgatgaaccagttaattcaccagctatacgagatatttttcctaaatcacccattgacatagtcacaacaggtctatttaaacgctttgacatttctaatgtcacatttaataatctaatgacatctttataagtttgtggcatcactgccaacttacaaatatccccacctaaaatttccattttctctagtctatccatcatatcatgagaacttggagttccttgaaaatcatgattagacataacaaccttgatcttattttgatgagctatctcaacaagttcaaaaaccaaagcattgccactcattaattcaatatcaactaaatcaatacaatgactttcacaagcaatttgaataagttttttatattcttgatcacttaattgaatacaacccccttcttttaaagaacgataagtcaataaaagaggaacatcagtttgtgcccgtaattttcttaataaacacttcactttttcattatctttcatatcctgataataatctattctcaactcaataagatcatatgttaaatcttgaaatgaatccaactgagataagatttcttcatcattatgtccaacaataggtaaacaaatctttggctttccttcaccaatacagacatctttcacacaacatactttcatacttactcctcctgatgacatgcatttaaaaaaagttcaatttctcttattgtttgctgaaaagaatcccttaataaaaaatgattcccttgtttaattattttcacaacacaataagggatagactctcctatcttcaaagtatcagctttttttatcatatcatattcgcctgccataaccaatactggaacatgaatattttttaaatcatcataggaaatttgtggctgacgtaacattaaacaagataatcgaaatgtttttctggcttttttattgtataaacaaaaaggtaacaaacaaatcatttcaatataaaatgtcaatcgataaaatggtttaatcattgatggcttggtattcgctccaatacttacaatatgttgaagtctttgatcactcattccaagtaataaagaaacaatagctccatcactaaaaccaatacaatcataagcttcaatagccaaagaagttatcacactttgcacatctttagccatttgttgataagatagctcaccttgacaaatagattgaccatgataacgtgaatcaattaaaatacagcgatactgttgagataatatctgaactgcctgatcaaaaatatgatgatcttcattattcccatgtacaaaaaccaatggaaaaccattccctataacttcataataaatatccaacatgaccgcctccttgtcctattatacacttttcataccatgaaataaatctttacttttgatggaagtgataataaacttgagaaatcaaataaaccaatccacatatgaaaagataatatataaaatattgactttgcataccaccagataaaataataaaagatcctaatgttgctagaagtggacaaatcacacctttaaaaaagctttttatttcctttcgacgatataattgataaacttgataatacaaaacaatataaagcatatatgccatcgaaatagcaatctcagaaacatcactattaggtaatatattaaagcgagtacataaataatggatgaccatccatattgtacaaactacaaaagcaaagatggctgaataaacaggaatgtccaacttctcatctaccttctttaattgagcttcccaaagaaacattcccttacgtaaagctaatgaataaggcatacgcatatatccagtcactagtccattaacagttcccattaccgaaataatcacaaaaacaacaatcatcttagcaaatgtatttcctaataatgcacttgctgcaacactgacatgtgcatcacctaatgccattacttgatcaacgcctaaataactcgttattccaacaaaatataaagtatagatagccaaaacaattaaaggcgcaatcgttaatgctttaggcatagcttttttagcatctttgacttcatgggcaatagaagtcgcaacaatccacccatcatatgaataagcaatgggacctaaggccataatccaacttgaagataaaagcgtagttggaccaatatcgccaagtcctgccagaggatcaccaaaaagaatccccaatattcctaacaacagtaaaggtaacatcttaataaaagttgaaacatcctgaaagattgctcctaacttaggaagtaaaatgttataaacaaaacaaatgcttaaaaagataaacccaataatcatctgtaattctaaagtggcttgaagatgaaataaaatatcaacataaaccccaatcacccaagataccactacagcaatcgttggataatatataaaagttaaaaaccaaccaaatccacaagctgtcttagcattcacaaactcttgagcgtaagtcacaagtccacctggttcatttgttttcgctgcaagctcaccaacacttaaactgccaaagataattgcaattgcagctaaaacaaataaaataacccctaacataatactaccatttgtcgcaattaaaatattatcactcttaaaaaagataccagaacctatacaagttccaacaatcattgtaattgccgtaagtaaactatatttttcatgtttatttttcttcatcatatcttccttttcatcataatgcatcaattctaccatgtctttactttcaacacaactcaaatgatttcaaaagaaaaagagatgttcccatctctagttataatcatcttcaactaatccatcatcttcttcttcatctgatgtatcttcttcctcatcagcatagatatcattcatatcaatatgaacttcatcaaatttatgacggcttcttaaatcccaacgattttcaccaactgtaattaaacgaccatctaaagtaatattagtataaaataatgattcgttttcttctttttcttcagcattaaatcctttgatttcagaaacttcttgccataatttatagaaatcaacaggtttctttttcttcttcattaaatcaaatgcaacatctaccattgaactttgtttataatcaatcataatatcctcctacattttttcaggtgcacttacaccaactaaatttaatgcattctttaaagtcatttgacttgcttttactaaagctaatctttgtgaagataattctttattttcttcatctataacataacaatcattatagaacgaatggaacaattgagcaagtttttgaatataatttgtaattttatgaggtgctctttgttttgcactttcaataatttcatttctaaattcattaatatgtttaacaagttcaatttcttttggatgaactaataattcaaaatgatcagctacatcaatttgtacttgcttagcttgtctttcaattgaacacattcttgcatgggcatattgagcataataaactggattatcattagattgtgattttgccaaacctaaatcaaaatcaaatggtgaacttgctgccttagatacaaagaaataacgagttgcatcaaccccaatatcttcaattaaatccttaattgtcacagcattaccagtacgtttactcattttaacaacttcaccgttttctaccattctaaccatttgcataatatcaatattcaattgatcagcattatatcctaatgcctgaatagccgctttcatacgattaatataaccatgatgatcagctccaagtaaatcaactaaatattcataacctctatccaacttatttaaatgatatgcaatatctggtgtcaaatatgtataacttccatctgatttaatcaaaacacggtctttatcatcaccaaactcagttgacttaaaccataaagctccttcagcttcataagtataaccttgatcttttaacttttgaattgttggttcaatcttattttcttcatataaagatgtttcactaaaccatacatcatgaacaactctaaattcttttaagatatctttaatcttttgtaattcatgttctgtaccaatttttctaaaataagcaatagcttctttttcatcaacatgttggaatttatcaccaaattcatctttaatcttttgagcaatatcaataatatcttttccataatatccatcttcaggtaattctttttcaattcctaaagcttgtaaatatctagcatataaagataatgctaaattcgtgatttgatttcccgcatcattaatataatattctttagtcacatcatatccagcagcactcatgatacgacaaatactatcacctactgctgcccctttagcatgtcctaaatgtaaatcaccagttggattagctgaaacaaattcaatgttatatttgattccttgtccaaaatcagtttctccataatgttctttctcttgtaaaacttcctttaagatagatgtcatagcatctttctttaaaaacaaattaataaatcctggtcccgcaatttctacatgatcaatattccccatatctttatcaattgcattaacaatcccttgagcaatttctcttggatttcttcttaagacttttgttaattgcattgcaatattacttgaataatcaccatgagctttatcttttgggatttcaatgactatttgttcaagattataatcttctacatatcctaaatcaataattgctttttgtaagactttctttaaagaaagctctattttattaacagccatagtatcctcctttacgctttttatcatactttaaatacaatatcatatttgacgatatagtcaacatttttcttacatcaaaggggcaaataatcgtaaaattgcttcataaattcctctaaagcgtcgactatattttaaatctattttttcgcttaaagcaagtgtttctttaaaatcttttgagatatctaaaatcgtttgtttttgggttaataagacattacattcaaaatgtaaatagagactgcgatagtcaaaattaattgttcctaccgttgcaattctttgatcacataaaaccattttagcatgtaaaaaacctggtttatattcataaaactcaataccctcttgaattaatgggtaataataagaacgcgtgacacgataaatatttttcttatcaggaaccccaggggtaatgatttttactacgactcctttacgtcgagctaaaattaaagctttcatcattgtttcatcaataataaaataaggagtcatgattaaaatttcatgtttagcctgccaaatcatatttaaataaatgttttcgcccgtacgttcttcatccaaaggtgaatctccataagcgaccacatacccatcatttaagaatgtatcttttggggtaaaagttggacgatattgaacataagattgatcttgatgcttataagcattccaagttgtcaaaaacattgtcgttaaattccatactccgttaccttcgatacgaatgcctgtatctttccaatgcccaaatcgcatctttgcattaatatattcatcggccaaattaaatccaccactataaccaatatagccatcaatcacacaaattttacgatgatcacgatgattcatcgcaactgacaacattggtacaaaaggattaaaaacaacacattgtatacccgcttgttctaatttcttttcaaaacgataaggaacagtcgttaaacttccgacatcatcataaataaaacgtacctcaacaccctcttgaactttttgtttcaataattccaagattgtttcaaacatcatccctctagcaacgataaaatactccataaaaatataatgcttagcattcataatatctcttaataaatccacataacaataatcgcctaaagcataatatttggtttgagtattggtatatgttccaaaccctaaatcagctaaataagttaaaccatcttttttaaattgttcatctttatcactcatttcatcttccataatcaattcatcttgaatatcatcaatcacatgttgaatcctatgacgcaagcgacgacttggttttttatttccaatcattaaatataaaagtccaccaaagactggaaacaccaaaataagaataatccaagacaatttataagaggaattttcatctttgttgacaagccataaaacaaccgccatacttaaaacttttaaagctgtattaagccattgatatgatgctaaaacactacttgtcatcaagacaatccagatcatttgtaaaacaatcaacattccaaagataaaaatacgactgataaagacttttaaaagtttcatgcaccctcctgaaaactatcaggaatcatagtcattaaaatataaactgttgaaatcaatcctctttgatcatgtaattcatatttcatcttgattctttcttcatttgcttcaaatttaagcaatcttgtttttaaaggaacactaccataaggtaatttgtattgattccaatgatctttatgaaaatcaaaatacaataaagaatctccatgacttaaactgactccattttcatcatagctcatatctatcttacccgcttctgtttcaaaacttactaatgtcttttcaccattatgtaaaattccttttgctttgtattcaattgtttcgctttgaccatcttgtttaaagatagctttataatgaatattttttgtttgatacattttccatcaccagtgaatattataacatacttttgttaaaaatgagagatgaggtgatagagttgaaaatttttataaaatgggtacgtagaattgtcattgctttttttgtttttatgattattgtctacacaactagttatatgatgcctgcgccaattctaggacaaggacattatattaaattatatgataatcaaaatcaactctattatcagtctaatcaacaaagtaatgatgtgactttaaaagatgtttcaaatgattttattaaaagtattgtagcgattgaagatcatcgtttttatcaacatcgtggatttgatccggttgggattatgcgtgctattaaagcgaatttattagaaagcaagaaggctgaaggagcaagtacaattagtcagcaatatgctagattaatgtttttaaccaatgataagacttggtcaagaaagattaatgaagctttcttaacaacccgtttagaggcacattataataagaatacaattttagaaggatatatcaatacggtttactttggtcatgggatttatggaattaaaaatgctgcccgttattattttaataagcatccaaaagacttagatttgaatgaatcaactttattagctggtgttgtgaatggtccagaatatttttcaccatttaaaaatatgaaacgtgctaaagctagacaaaagattgttttagatcgactggttgaagaaaaatatattactcaaaaagtcgctagtaaaaccttacaaaccccatttcaactcaatcaagaccgttcttcatctttaatcaatgcctatccttattttaaagatactgttatccaggaattaaaagatttaggtttctatagtgaagattatattaatcaaggcttaaatgttcaaacaaccttaaatagatctgtacaagatgaattaaatcaaacagtctctcaattaatgaaagatcgtgatgaattagaagtttcgagtttaattgttgacaatcatcaatcaggtgttttagctatgattggtggtaaagattatgaaacttcacagttcaatcgtgcaactcatgcagcccgtcaaattggttcaactatgaaacctttgctttattatgtagctttagaaaatggcttttctcctacaacaaagtttaagagtgagcctacaacttttaaattagataatggaaaaacttattcaccgactaattttaataaaaaatatgcttataaagatattactttagctcaggcaattgctgtgagtgataatatttatgcagtaaaaacacatatttttttaggtgaacaggctttggttaatgctttatcgaaatttggttttactcatatttccccacatccttctttagctttaggaacgttgaatacaaatatttacgaattatctaagatgtatacaacttttgctaatgaagggatttataacgatgttcatacaatttccaagattacaaataataatggagatattctatatgaatataaaccaacaaataaagaattactcaacaaagaatcttgtctaatcttaaatcagttattaactgcaccttttgataaaaggtatagtacttatgcttcagcaacaatggccaattatccaaccaaaacgaagtttgctgtgaaaactggttcaacctcttttgattctttatgtgctggctataatcccaattatacaattttaagttggacaggttatgatgataatcgtgaaatgaatatggcatctgattctaaaattcctaaggttatttttcaaactatggcaaatagtttacaaaaagaggatgtttggtataaaccaacaaagaaattacaacagattcctatcaatcctatttcaggagattatctggaaaatggcattatttattggtttaaaaattcatagaaaaagactgagaatgatttattcattctcaagtcttttttattctttattaacacaaattcttaatactttttgagcatcagctgaagtaatttcaccatcactgtttaaatcagctaatatcaattgttcgtcatctagttcaacttttccaacacagtatcttaaaattaattgtgcatccgctgaagtaatctcaccatccctattgacatctcctaacatgtatgaaatgtctgaaacaattacttcacatttcacttcaactttataaccagaacattctactgtaattgttgctgaaccattagcaatggcagtaacatttccattttcatcaacattaacaattctatcatcagaagttgtccaaattaattttgcatctggaatatttgtttcagcctttaattcaaatgtttcatttgattttaaacgaagtgacgtttcattcaaatgaatatatggtgcagttaattttgtataagtgattgttgcagaagctgttttacctgattttgttaacactacaaccttatatgtaccattatcttcaattgaatatccattttgataactgtcagtaatattttcttcagcttgattattcttttgaatcttcacaagaccaattcctgattgatcagcttttacatgaattgtaagcttatctctcatttctgtactttcagtattaccacttaaagtcacttctggttgtgaattatcaatatttgtataagtgattgcttttgtagcttcttgaccatcacttgttgttaatttaaattcatattttccattttcagtaatcttataaccatcttggtatgaatctttaatatcttttaccaatacgtcatctttataaacttttaaagaagttacaactgtatttttaggactaataatgaatgatactgtatcttcagtaagatattcttcatcttgattagaatcaatatcaaatttcaaagtcatatctggaacatagatattattataagtgattttttgagtaaattcttgatcagatgttgttgtaacggtaactgtatatgttccattttcaatgattgtttgcttttgctgataagtacttgtaatatcttgaggagtttcattatctttttgaattgttacctttttcactatatctgtgtttttaaatacaatctctaatagatcactcataactttgtcttgattatttccaattaatgttaagtatacaggattagtatcaagacaattgtaaactatcttttgttcatcttcggcacccttttgagttactacacgaactgtataagtaccattctttgtgacttcatacccatttttataagatgaagtaatatcttcataatcattaccatctcgcttgattccaacatattgaatattatcattatcatcaattgttaaatcaattgataattgatctttttcaacaattttatctgtttgaccttttaaatgaatttctaatgttgctaatttttcaaaatcatatggtgtaactgtttggttaccagcattatcagtaactctaacaattaattgtccttcgaagttagcaggtactgttgcagttgttccaattgtatatggacaatttgcttcattttgacctttagcgactaatttgtattcaacactcttaacaccacttaattcatcagttgctttaatattaatctttctacccactttttgaatcactgatctcaatttcggactaatatcaacgatttcagataaaggacgttcttcatcgactttaacattcacaacaacaatatttgactcttgtttattttcatctacagcttttatataaagtttatgttcaccattatcaatagctgtttctggattatattcttcaaaattctttccatcttggctcactaaatatgtgatcttagaatcattatctgactgaatattaatattcaattctactttttcatttgcccatgcatttctttcaatggtttcattagattctgttttttgaccaacaacgtcaatctttaattcactatctgtttgatctaattcatttgtaacattgaaacctaaatgtccgtctggtaaaaactcattatattcatctaaataaatggactcattcacttcatctgttgcttttaaagacaagaatgaatattcaccagttttgaatgtttcatcaacactcatataaactttatattttgtatctgctaatcgttctacctcactacaataaagtttatcttcataatttccaaaatataccttaatatcttgaatagctttattaaattctactacaaaactaatttccttattgtcactagcattatagttttcttcattttgaatatcagaaatattaacaacctttaaaggtacatgattttctataccacaagcgacttcaaagcaatgttctggttcaaaactacattccatctcatcaccatcaacttgatatgttatataacgtaaataatagatatcatttttaagattactactaatttcaacatctatttgccacttatgtgcatctatttgcttaattgtaatatctgggattgtaaaattataattatatgaacgaatatctgctgatgttaatttaaattcttgatctgattcaacgatatatgaataagttccagtttctttataaatagattgatttgttgtaactggagtaatattaaatccaacatcatcgtgactttcattttcatataatgtttttacttttactgaatcaagattccataatttccaatgtgtatcttgattatcaatatcaaaacaatactcattatcatattcaaagataattctacttaattgatattgacttaatggactaaaattataggcattaaattcataatgataaatgtataaaccatctttttcttccatattaatcaatgaagaataagtatcagtataatattcatcattaatattttcccattcaaaatcaagcgataaattattgattttcttattaagagcaacatctactaataatttttcatcaatattatttaattctgttggaccattaaatttaatcgaagatacattatcaattgatagcatattacattcaacattatttgtaaattgaatagttgaataataagatggatctacttgataaggtttaccatcatcccaaacctcaaatttatcaatgtgatatactcctggttttttagcatcagtaatatttacaccataagtatattcataaccattttccactggcttaactgacatttcataggcattaatataatcaccagacacattaataaaattaatattactaaaaccgacttctttattaaatacagctttaaaaatgactttatctcctacttcattgaaaacaagattatcttcaggagttacagaaataatttttaattcttcaacttcttcttgaggcaaatcaactttaaattgaatactatctaactcattagcaaatacatttaatgttgaattattttcataatcattaggataacccacatgatttccatatttatcactaatttgaagattagaaaaatgatactgaccattttttaattgaccattttctccgaaatataatttgacagcatacaaataattacctaaagaaataaaattattccaatatttgttatcattttcatctgctaaaacaaattgacttgaattcaacgaaatatcctcatcaaattggaaataataagtatattctccagcttctttatatatttctttattagatgaatgaccatacatttttaataactttggtgcatctaaatcagatataccacatgacactttaaatcctaatcctgacaaataataatatcctctaccattatcatatatattataatcattagaattatcatatataccactcaaatttatgcttcgaatataataatcaccattaaatgtttcatgatcaatttgacaagtaattttatactctttatctgctgttttttctattttataacttacattaacatatttattaacataaccttctattgcaaattgaatatttgaatgatttatattgatatcagctgaagttgttaaatagaaaatagcttttccatctgaactataattagtcaaattatttttatcagcaacaagtttcttaatctttggagctctttcatattgacgtccacattctacataatattttactttttcaaatacttctgaatattcttcagagctacgataaatttcatttgattgatcattaagattaatattgattctttctaatctgtattgaccattcaatgtcatttcattaatatcgatttcaaataaccattttgttctttcgttatttgttgcctctccacttatatagctagatcttgcataggttatattttctaaattcatacttataccagaaacactttgatctgtttctaatgaaatagagaccttaccattttttgaataaatatcttgaatttgataattgaaatgtgaaagtttcacatcgttcatttcagtaatacctgctgaaacattaacttttattccaaatattttttgaatattggtatcatcactaccttgatgagaatagtaataattctcatttccatgagcatctctcaagttaaaattattgatcgaataaaccccatcaaatgagcggtttgttgtaaagattgttactaaatattcacatttagattcatcaattaactcaattcgacttgctaaatatccagaattgtttgttgaaagactgaaattagaattatttacatttattaattcacttgttgttattttaaaactacaagtatcattttttgaagttatgttaaaatcttgagaatcatcaatttgaacacttgttatttttggtgcttcaaaatcatcatggctattaataatctcaaattgaatttgatctaacttcaacgaactccaaatattttcatacgaagaaagattgaaatattctccattacttctaaaatttatattttctaattgatagactccattcccataagtgtcattgatatatccctctactgtcccctttaatgcttgaaaatcatattcataaaatgtaattcttacatttgggtgatctttattaacaaattgtagattaacatcattgactaattttgtaaaatctaattggaaatctaatttatcacctggttttacctgtttattattttgtgtaaatgataaagaatttaaataggccctatcttcactttgaacaataaatcctaaatttcttaactcactatcaccataattatatatatcttggaatccatttgttgcatataagtgttgtatattatatgaaccagctatcatattttcatcataatgaattgtatatgtcgctgtttttccatcaatatctcctaccactcgatatgtttgattactattcatgcaattaaatgttaaatatgtataactaatggtatgattaaattcgatagtaattttatattctggattgtttttattaaggtatatcaaatcagaaggttctttttttatattagtcatttttagttcttcatatgttacttctgaatcttgaacaacagtaaaactcggattaccaaatgcattactatcaacactattcttattcccattttcatcacataaatctaataatgataaatgataatcaccagctactgttttttcatcacaaataaattcaatagtatattcatgattaccaatacttctcaattttaaactatgaccatatttcgcagaaatcattgcagaagaattttctaaactaatatcttcatcattttttagagtaacagtgtaaatcactctatctcctttagtgactgttgcaccattatccaaattacatttaatatcaacaaattctggtgcagtaaaatcatcactcccaaagtcaactttaaaagagattttatctaatcctaaagattgataaagttctgaatctttatcaatatacaaatgaccaaaatttagtgattcaaaagaatattgacctttaatagctgtctgagcatctatatgataagttaatttatattgtatgtcactaataggctctacagacatattaacatttctagaatgtccatttccatcttcaacatttaaattagcatttggccatctattataatttttatctgtagtaataataaatgaatattcgcctgtttctgtataaacacttttattattcttatccaattctattgatacaatgtgcggtacgattctatctgaataagtaaattgtgcttcattaaggtttgtatattttatctgattgacttcaatagcagatataataacatttcgattttctccaaatccaagtttttctaacttgccattgacatatatctttgaagttaaatcatttgtataatatgatatttcttgtgtatatatttgttttgtttcaatatcttgaaaagtaatacttacatttccagaactattggcttgtgctaattgatagtcatcacgagatgtgacttctaaaccaaaatttaccccttcatcaaaatactctccataaagcgttaatgtaagtttttcttcactatcaattgcttcacttaatggttctaaaccacttgcatggacgttcattggtaattgaactaaagtcaataccataatgaaagcaagtgcaacactaataacttttttcatattttcctcccatataggggagggtagtttcctaccctagcctgttattataaatattttttctttctataacttaatgcgataactactcctgaaataaccattcccattaactccataccaataagtgttgtatcatcagtatgaactgttttatcattctctttttgtgaatttgtttcttcttttatttctacatctttatacaaaatagcaaattcactaaatttatctgattcaaatgttaaatattttttatcagcagataattgagtttttaaaacttctatttttccatcatgaattctaacaattgtatattcacgattcttaccaagaagatcttttggaatctcaattgttatttttaatggtttagataaatttgttaattcatcactttgtttttctccatcaaatgaagttacttgagctaaaacatcaatattcaaccatgttcctacttgatattctttaagaagtccttgttgagataattgattatttaattgtatttgagcttctttattttcaactttttgagatttaacaataatatctaattttccaccatcatttacaatttctttaaattcttctggaacattttgataaatgtcttgaagttgatcttgaggtacagataattggatatcttgatcatcaacaatgtaagatggctttccttttttgttaacaactttaacatttaaggttgcaacaatctcaccattttttgcagatactgtgataacaacatttccctttttaagtgctttgatatttccttttgaatcaactgtagcaatttcttcatcagaagataaccatgtcaattttttagaatcagttgtattttcaggtaaaattgttacatgagattgatatgaatcaccaactgttaattctatagattctttatctaattgaattgattccattggaatttcataaacttctatttccatttcatcaaaaatttcatcattgaatttagaaacaactcgaataattgctttaccaacttttaatcctttaatctttccattttgatcaacagtagcaattttttcatcagatgaagaccaaataacacctttatcatcagttgtatcattaggattatatttaacttccgcttgttttgcttcatttataacaattcttggtgaatctatattaatttcaatagattctaatttaatttctttcacttctattgtatgaatagcttcaaaacgtttatttccaacatatccaataacgcttatatcagcagttccttctttaagaccagttacttttccattttgatcaactttagcaatcgatgcattacttgtttgatattgaatatttgttaattcatcagttgcatcactaggatttttttgaattgttaattgtgcagtttgttcttttaatactgtcttggctccatttaattcaatacctgttaatggaacattaactttaacaagacattctgctttttgtccagctattgtagctgtaattgttgcttttccacctttaattgcttcaagttcaccattttgattgacttttacaacacttgaatcagatgatgtccatttaactactgtctcatctgttgtattaagtggtgtatatgtagcagtcaatgtagctttctcaccttttcctaaatttaagtttgttttatttaagataactttttctacatgaatttctttaacagttacaataactgttgctttataactcttttcccctacatagtaagtagccgtaattgttgcttttccttctttcaatgctgttactttaccattttgatcaacacttgcaacttttgcatcagaagttgaccattcttttttagtaattttatcatcatgatttaaaggactttctttaactgttagttcttttgtctcattcttaattagtgtaaaatcattttgttcaatctgaatttctaataatggttgtttaatcgttaatgttatatttgttgttttatctgcaaccgttgcaataatatcaactgttccctttgataacgcagtaactacacctttttgatccactgtagcaatagatttatcacttgatttccaagtaattgttttatctactgttgtatctgttggatcatatttaacagtcaatgtttgtgtatctttaacttccattacattcgctttacattcaatagtaattccctttaaaggaacactcacttcaacatcacaagttgctttcttacctgcaattactgccgtaattgttgcttttccaccagcaatagctttgatatgtccatttttatcaactgtaacaatcttatcatttgatgaactccattgaattgttgtatcatcagtagtgtctagtggtgcataagaggcttttaaatcaccttcatcacccttaatcaattcaacttttgttttgtctaagctcacacttgtaacatgaatttctttaacttctacttttacagaagaagttactgttctatttccaacataatatgttactgaaataacagctaccccttcttttattgcttttacatttccattttgatcaacagttgcaatcttttcatcagaagaactccaaactttttgatcaataacatcatcatgaactgatggatcctcactcactgttaaagccttttctttatttttaatcagagtaaaatctgattgatcaattttaattccaaccaatggctgttttacttttacttcaacagtagtgctcatacccgccattgttgcttgaatagttgcagttccacgtttcactcctgtaacaattccattttcatctacagtagcaatcgtagtatctaaacttttccatgttacttttttatttactgttgtatctaatggtaaatattttacaactaactgttgtttacttccaacatcaatagcactatcaagcttatctatagtcaaactttctaaaggtattgtaacagtcacttcacaagttgctgcaaattcaccaatagctgctttaattgttgtttttccacctttgtgggcagtaatttttccattttgatcaacacttgcaatttcactatcttcacttgaccattgaacaacatcagtattcgttgtaaattcaggaattttactcacaaccaatgtctcagtattccctttatccatcactaaactttttttatttaatgatatttgttttaatggtgcatcaattgttatttgtgtattcttaatttcattaacaaaatcaagctttccaccattaacatcagttgatttataaacttctaattgaataccatgagttccaactgcttcttttgtatttaagacttccattttaaaagttattaaaatagaatcgtctatattactttcaaattcatcacctttagcaaccgcaactttaagttttccggatgcaacttgattatattccaccgcaattcccaaactacccatacctaattttgcagacttatattttaaagcttcttcatcaaaattaatatacaaatcaaatgctgcaaacttatctttaggatacattcttaaatcgacatcaatagtatcccctacacttgccttttcaggtgctgataattcaaatactttatgggaaacattttctgcctttactggattcattgttattaatggaacaactaacaacaatgacaaaacgagtccccatattttctgacatttcgtcttcatactttccctcctgtttctattctcacaaaagataacataaaatatttctatttttatacctctcatcataattatatatactttaagaaactttaacaataaatattttctatttttattattttttgttattttcctgtgattttttgggataattttagaaactgcataacaacaaaaacgtaatttaagatacttttaaagtgtttacatgaaattcttatataatatccatagatagataaggaggagatataatgaatacaattggttctagaattcttaatctaagagcagataaagacataaaacaaagtgatttagctaaccaaattggtattacaaaatctatgctttctaagtatgaaaatgatatcaatattcctaaagcagatatcctttccaagattgctgatgtcttagatacaaccactgattatttattatgtcgtacaaacaatagtgctcctctatctaaaaataaccaaattaaattcttagatgactatcattttaaaatctataacatcgctgatgaattaaatctagctaataaaatccgtctccttgaacgtgccaatacattactagatttacaaagagaacaaaacaaaaatcaaatcaatccattaaaaaaagatcaataagtatacattgcttattggtctttaaatttattttctgaaattaaattgttataaacttcaacatttcaagaagccctcaataatcttttaatcaaaaaaagagaaagatatctttcccttcactactcgcttaacacttcttctttaactgcttcttcatcttcagtgcttttttcttcatcttgattaactttttcaatcaattcttctgcttctaaactttcttgtttttgaacattcttttgttttaataattgaataatatatccacaaccaaaaaccaaaacactcaatcctaaaaatacagcagtattattgacataatataaaatcacttctaaccaactatctgtcaatgtcacttgtcctgaatctaataattgcatgatataagttgaaacattataaattgttaataaaaaacttacaaataataatcctgctacaatataaaatgcaatactcatttttgagattttcttttcctttaatttcatgaactttcctccttacatgatgttttctattctacaagtaaaatgtgtgaaaattatgtgattacgatttatctttacgtgaaacttttttaaatatccaatagagtattaaaacaactaaaataaccttccaaatcatatcatatttattcatatacatcgaaatcaaagaccaatttgcgcctaaataagttcctaataaaacaagaattgtatcccaaagcaatgttccaaaaagcgtataaagggaaaatgtaatgaccggcatttgtgccatccctgccggaatagagattaaacttcgtatcattggaacaagtctaccaaaaaatactgcttttttcccatgtttaacaaaccaatcttgtgttttataaatatcttcacttttaaaatgcaaccatttaatccaaggactttctaaaagatgagttaacctttgaggagttaataatctcccaattaaatataataaaaatccaccaataaatgaacctaagcttcctacaatgatcactccaaaaatactcaaataagtcatcgaagtcataaatccagcaaaagtaagaataacttctgaaggaatgggtggaaagacattttcgataatcatcaatagaaacaaactgatataaccatattcttccatcagcatcataatccaatcttgcattaaaaattctcctttcgttttacagcattcgcgttttagctatgttaaaatgagcatacttattattatataaacaaaaaaaagataaatattcgctatttacatatttttacgagtatgttaatataaggctaatgagggagtagtctcacaatatgtgtgatgtcatcaacaatcgcggatagaaaactattctggtgcatcttaaagacaagactcgttaaagataatggaatctttagcgagcttgtcttttttgtttgctgaggttctaaatgaaggaggatatatatgtattatcaaaaaaacattgaacagacattaaaagaatgtcaaacatctaaacaagggttatcaccagaggaagttgataaacgtcatttacaatttggtaaaaatgaattagatgaaaagaaaaaagatagtccgttaatgatttttcttaaacaatttaaagatttattagttattattttaattattgcagcaattgtttcaggaattagtggacaattagaaagcgccttagttattgttgttgtgatttttgttaatgctgtattaggaacagttcaaacattaaaagctgaaaagtcactagaaagtttaaaaaagctttctattcctcaagttaaagtcattcgtcaaggacaattacaagaaattgattcaactgatttaacaattggtgatattgttcaaattgaagctggtgatattgtcagtggagatggtcgtattattgaatcatcttcattacaaattaacgagagtgctttgactggtgaagttgaaagtgtggataaaataacggatactattcatcaggatgttgttgtaggtgatcaaaagaatatggctttttctggaagtttagtaacaaatggaacaggacgttatgtcgtcacaagcattggtatgcaaaccgaaattggaaaaattgcctctatgttaaatgaagcgaaagaaagaaaaacgcctttacaaaagagtttagatgaatttagtgggaagttatctattgcgattatgttcatttgtgcaattgttttagctttaaatcttttcttagctaaacagtctttacttgattcattgatgatagcagtagctttagccgtggcagcaattcctgaagcattaagttctattgtgacaattgttttatcaatgagcactcaaaagatggttaaagaaaatgcgattataaagaatttaaattcagtggaaagtttaggttgtgtttctgtgatttgtagtgataaaaccggaaccttaactcaaaacaaaatgacacctcaaacaatttatgtttataatcaattattagaaatcaaagatttagatagtcataatcatgatcataatgttttattaaaagcttgcttactttgtaataactctgtaattaatggagaacaaagaattggtgatcctactgaacttgctttaattgacttagtgaatacccatacccaaaatgatacaagctttaaaaatacagcaattcgtaaaagtgaacttccttttgattcagatcgtaaattaatgagtatttcttcattgaatcatatttatacaaaaggagctcctgatgttattttacaaagatgttcaactattttaattaatggacataaagaaattctttcaaaaagacatatggatgcaatagttgctaaaaatcaagaatatgctaatgaaggtttacgtgtattaggttttgcttataaagattataagggaactcaagtaactttagatgatgaacatgatttaacatttattggtttaatttccttaatggatccaccacgtgaagaaagtggtgatgctgtagcaaaatgtaaaatggcgggtattaaacctattatgattacgggtgatcatgttgttacagcaagaagtattgcgaaaaaaattggtatttatgaagatggtgatttatcaattgaaggtcaacaattagaaaaaatgagtgaaactgagttagatgaaaaattaacacgtattagtgtttatgcgagggttgctcctgaacataagatccgtattgttaaagcatggcaaaaacgtggcgatattgttgcgatgacaggcgatggtgtcaatgatgccccagctttaaaacaaagtgatattggtgtggcaatgggaattacaggaactgaagtttctaaagatgctgccagtatgattctaacggatgataacttctcaacgattgttaaagctgttattactggtcgtaatgtttatcgtaatatcaaaaattcaattaattacttattgtctggtaactttgctggaattatctgtgtatttattgcatcactattattactaccaacaccattcttccctgttcatttattgtttatgaatttgattactgattctttacctgcaattgcaataggaatggaagcaagtcgtaatgatgttttaaaagaaaaacctagaaattctaatgattctattttaaataaacaaactttaagtcaaattagctatgaaggtattatcattgccttatgtacaatgtgtgcctatttaatgggattaaaaggtgatcctctaactgcttcaacaatggcttttgcaacaatctgtttagcacgtttattacatggcttcaattgtcgtagtgatcaaccattaacaaaaatcggtttattctcaaatcgtgcaagtattggtgcatttattattggatttactttattacacattattttatttgttccattcatgcatagtttatttatgattcatacaatctcttttactcaattattatgtatttatggttttgctttattaccaactattattattcaagctagaaaaatgctaacaaagtaaaaatgagaggaaatcctctcattttttaatgccctgaacaatgatgtttatcttctccacaatgatgttctccacaactatgatcatgaccatgttcatgatgactgcattgcacattttcattatattctaattgctcatttaataacgcttcaacaacatcatcagcttctcctgatacaccaccatataacttaatattcattgatgctaaagcatttttagctccttgaccaattcctccacaaatcaaaacatctacatttaaatttgttaaaaaaccagctaatgctccatgaccacttcccatagtatcaacaatctcactttttacaactttttgattatcaacatcatagattttaaattgttgagtatgtccaaaatgttgaaaaacctttccatcttcataagtcactgcaattctcataatttgttctccttttcttttcattaaatcttcatataatcgataatgtcctcctgtaatatgaaggcattttccattgacaagactatctgcaatcttataacgtgcttgttcataaatctcagtaacagttgttcgagaaatatccatttgtttcgcacattgctcatgggtctttttttcaaaatcaatgagacgaataacttcaaattcatcaacattgagtatcaattcttcattatccttcatgccataaggtccatattgattaaatacaggttcaaaacaaactctacgacaacgctttggtcttgccatctcttatcctccttattaccgacatatgtcggatatattttataatacttctctttcaaagtcaatatttctttcgcaaaaaaagcaatcacaataatttgattgcttttttatgctatttcttttttcatttgtacatgtggacaatgttcatcaagatattcatcaccataggctatataaccatttttacgataaaaatcactagcacgtaattgtgctgataaaacaacctcatgataaccaagctctttcgcttttaattccaatgcttgcaagataaagctaccaatatgtaaatgtcttgcttcttttaaaacagctattcttcctaatgtcatctgaccatgatcatcaaacattcttgcacatccaaccgccttatcatccttaaaaacaacaagatgcaaacatgctgaatctcttttgtcaaattcattttcaaagccttgttcctcaacaaaaactttttctctaatcagcttagcttgagctggtaaattttcataaaactgatacttcatctttaatctcctttgggaaaaatactttttgatctgacttaaatttctttgaatttaaaatagctgaaacaatctctgatttactaggtaatggtgaaagttgaccctcgcgatctaagatttcaatttcacttaattctccactttccccataatgtaaataaggaacttgtttttgattatcactcataatatagtaatgtgaatcataacccaatgaatcagctaatgcctttattttagctaatttagtcatatctttcaattctttatatttaaataaatgacgatttaaaaagcgtgctgataaatcacttaatataaagtcatcttcattcataaattcactaaaataatataaaacaacagcctcatctaattttgtaaaagcctcaactgtaatattattttctaaaaaaggaattaaaaaatgtaagtttgtcttaaatttaaatttttgtgcatacaaatcctttacacgcgcaaaaatactttgtaataaatgttcatagcttcttgctgtaggatgataataaacctgccaatacatatgatatcttgctaaaatatagttctcaatcgcttgtacaccagattctttataaacgatttttccattacatatacgcattgttcttaaaattcttgacatatcaaacttcccataagttgttcctgtcatatatgaatcgcgtaataaataatccatacgatcagcatctaattgacttgaaaccatttggatgagaatttgattaggatgagtatgttgaataatagaagcaacatcttgaggcaaactttcatcaaccgatgctaaaatatcatgaacttcactttcttctaaaataattctcactgtcatatcttcatgattcccttgaaaaacaccttcaaaagaatgagaaaaaggcccatgaccaatatcatgtaataaaccagcacacatcacacataacttatcataatcacttagcacatcatctaaacattctgtttctaacattcttcttacaacctgataaacacctaaagaatgaacaaaacgtgaatgttcagcactttgaaaaacttgataagttccacctaattgtttaactctccttagtctttgaacctcttgagaattaattaaacgccaaataatcaaatgatcaacatgaatataatcatgaatagcatctctaaaaactcttttttcattgagttcattatcctttaatgagaaagattctttaaagtccataaatatcacctctttcttctattttaccaaacttataaggaagaagtctatcgaaacagcattatcattgttataattttttagaaggtgtacaatatagaaaaggaggatttgatatgttagatagtaaagttgctgatttgttaaatgatcaaatcaataaagaaatgtattctgcttatttgtatttagattttgcgaatttttatactcataaaggtttaaatggttatgccaattggtataatgttcaagcaaaagaagaaatggatcatgctataggtattttacaatacttacaagataatgattttgaggtgactttgtcagccattgataagccagataaagttttagataagcttgatgatcctttaagatttggattagaacatgaaagatatgtaacaagtcttattcataatatttatgatgctgctcaccaagttaaagattatcgtacaatgaaattcttggattggtatgtcagtgaacaaggtgaagaagaaaagaatgcgactgatttattaactcaatttgagttgtttggacacgatcctaaatccttatattcattaaataatgaattactttcaagaacatatacacaagcttctattttaatgacagaataagaccgaaaggtcttttcttttatataaatattttgttataatatagcctaggaggttttgtatatatgtataaacaaattaatgaagcatacaagtatatttttgaacaatacagtcaccctattgatattgcaattattttaggatctggacttggacctttggctgatgaaattgaaaatccagttattattgattatcaagatatccctttctttccaaaatctacaattcctggtcatgaaggaaagctttatattgggaaaattgctggaaaaacagtttgtgccatgaaaggacgtttccattattacgaaggacatgatatggatattgtcactttaccagttcgtgtatttgccaaacttggaattaaatatttatttgttactaatgcttgtggtggtattagagatgatttaaatcctggtcaaattacacttatttctgaccatattggatttatggcacctagtcctttacgtggtcctaatcttgatgaatttggtcctcgtttcaaggatatgactgaagtttattcaaaagaattacaagcgattgctaaaactgctgctcaaaaaacaaatgttcagcttaaagaaggtgtttattgcttctttaaaggacctatgtttgaaaccccagctgaaattagagcattaaaagcaattggtgcagacatggtaggaatgtcaactgttcctgaagctattgttgcaagacattctgggatgacaactttaggaatttctttagtcacaaataaagctgctggacttggaaatagtgaacttgatcataaagaagtgatggaagctgctaataatgctgaagaaaatcttgtaaaacttgttaaacaaattattgctgatatgtaaaactcctcattggagttttttcatttatttctattctacttcttaaaaaaagatgttattgtgatttattttcaaaagaaaaccagaagctcccttctggttttttaactaaaaatatcatagcctatttgttatgccattttacaatggtaaatctcttttagaaaaattcatacatccaatcacaatacacatcaccgctaaagcaaataatccagccatacaaagcaatgattgctgattataagcctgtaaccccttcgcatcaaacaatgtcaaaggtgtgaaatattttaaaaattctattttatcgctcacttgtgataacatttgaataagaatagaaatgactcctaccccagctccaattccaatagataacttcacttcattaaagctacatgccgttaaataacaaaaactagcaaaaaagaaatgcactcctaataaaccaacatttgtcattaagaacttcgctatatcaatggattcatgaaacatcattgaactgcaccctaaaatcaaaacaactgaataaactatcaaacctataaccccacttaataaaacacataattgagttataaaaatatcacttcgcttatgtggggttgccagtaaataagccatagatcccttatcaatgtatcttgccattaaacgatgacacataatcatgatataaacaagggggataataattaaaataaaaccatataaataattcgttagaaaatctaataaagttaaaccaggatctgtcataccaaaagctgcaaataattggggcatcgattctgccatcatatttaaactttctccaagctttggatcatacatagctacaataattgattcatacaatgtcataattgctataaaaattaaaaatattttataattagatttccattctcttttaaacaataccattgacattattgttcacccccataataatgtaaaaacaattcttctaaagactgtggtcttgcattaaaatcatcaatatcatattcacttaaatcttgtaataattgatttgtatgtccctttaacattaaatgaataatttttttatctctttgactttgtggatatttttgactaaaagcaattgcttcactttcatcaaagaaatgaatttcataatgttttaaacgattctttttcaaatcatccattgtcttagtcgcaacaatatgtccttctttaatcataaccactctatcacaagtattttcaacttcttcaaaaatatgtgaggacatcaatatcgtcttacctgcttttttagcattttggattaattcaacaaacttattttgcattaatggatccaatccactagttggttcatctaaaataagaataggcgtatcttgcataaatgcaatcacaataccaatcttttgcttcattcccttagacatacgtttcatttttccacgagcatctaattctagaaatttcatcaattcttcagctttactcatatctttcatatttttcattttagccataaaacgaataaactctaaaccactcatatcttccataaaagcaatttctcctggcagatatccaaccttttcttgaaccttcgctgaatcattaaaacaatccattccaagtattgtcacttcaccttggtccggtttcataaatcccattaattgacgaatcgtggttgttttcccacttccattaggtcctaaaaaacctaagacttccccttcattcatttcaaaactcacatcaaagacacctctttgattcccataatccttagttatatgactcacttttataacactcattgatattcctccctataacatatctttttaaacatgatttcccattttttaaaatcttccatcatcaattttatatcaatagcttcatttgtacgcattttatctaatagataaccttcactcatccatacaagcatttgataaatttctttaaactctatcccatctttaaaacgacttttatcaacattatgaaaatactgatcaaatgcttgattcatagttttttgaattaactgctgaacttcttcactaacagcttctttttgtgaataaaaagcttccattataaagtgattgatatatggatactctgtaagcatttctaatttttttcttgcgccataatcaataatatcaaaaaaatcagttaattgattcaaatactcatcttcaatataatcattcaataccttttcacaaaaatgatacaaatacaaataaaaactctttttatttttaaaatagtaaaacaatagcccttttgatatccctgcttttgtagcaatatcatctgttttggcattcttataaccatattgtccaaagtactccattccagcattaatgatacggagttgcttttcctttggcaattctaagaacttgttttccatacctttctcctttttgactcatttggtcaatggctatattttaattgtacttcattgactattttttacaaccccataataaaaaaaagaacaaatttgttctttcttataaaaattctttcaattcttctatgtatctttttgaaatatcttcaaaatcatcacaataactctttaatgtctgatcaatatcttgttctctatttaataaatgagtcattgtcataactgattgattacttccttcagttaacatcttggctatttttgcatcatcagttaataatgttttcatttcaatcattgattctaacataaacttttgttttgttttatcctcagcatgaggataagtttgatgaaccttattttttaaatcaccataattctttctttgatgaataacaatttctcttaatttctcattttctatcttatcaagtaaatgatcaattgctatcatccccatatttaaaccattcaacaattcttctatacatgtttcttcattcattttcatcaccatatatagtttttaccaaaatcatgatttcatacataaatattttaattctatccaaccaacttgatcttgataaatcacataagcatactgatcataaatcccaataacttttactttagcttgactaggaattgataacatacaatcagtataatcatctaaacaataatcttttccatgtttacgatataagaattcattttttatccataaagtttgatttgtttctttttgataacaaagactaaattgtgattctcttttttgaatttcaacttcaaaataaggaaaagatattttgtgaatatcatgagcttcctgttgtatttcttgataaacaagggaataaggtaaaggttgaacatattctttttggtaggttatttggttatctttactttcaataataagggcatttaattgagatattgatttaactcctgttccaccatctatcgatattatttttttcttttcatctataataatctgattatcaattgtatgagttgaataattagaggttggtaaatgtccaacaataaccatttcatttaagacatgtccttgatcaagaaaatattgcatctctaacaatgaagataatgaactattcttataatcttttcttttttcaatacctgcatgaacaaataaaaattgattcatttttaaagtaactggtaaatgagaaataaatttcaattcttcacttaaatattcagcaatttgcttttgaacaccaagcatcgtttcttttccatcatctaaatgaagtttatgataaacctctctaatacaaccattagctgaaatacgtttcagatattgaggaatttgactagcaagttcaggaattgtcaataatgcatctaatgcccattcacaatttcccataagaacataagttcgaggattttgttttaacctttctacataatgaattgtttcaattacttgatcacctttttctacaaagtcacctaaaataatcaaataatcctctggtgtatattttactttttgtagtaatgatttaaatcgatctaaatgtccatgtatatcactaataacaatcatacgataatcgcctttaattgtcttatttaaatgatatggagttatcacattatcacatccttaaatatagtatatatactatatcataatttataaaccttttccaaataagaaagataatatcttatttaaaaaaggctcataatcaaaataaaaaagaccaaatgtttaacatttggagtatcaataaagttatttttatatcagttgtgtcaaaaacattttaagggaactctattgacaaatcatattctagtgaattattaacttcaaaacaatatctattgataagaatgaataatttaaccaaaatctcattgttcttttttatttttttgacaattattgaacaattttggttaaaaaatattattctattattatatagactggacacaaaaatatctttttattcttgaataattgtttttataacttttgctggaactcctgcaatcatactattttctggtatatcatgtgtgacgactgaacctgctgcaataacacaacctgaaccaatagtgacaccaggcatcactgagacattggccccaaaccaacaattatctccaacaacaattggcaatgctttttctaagcccttatttctatttgaataatctataggatgcgcagctgtatagaatccacagtatggtccaataaaaacatgatttccaattgtaatatcagctccatccataaaataacattgcaaattaataaatacatcattccctaaatgaatattcttcccataatcacaataaaaaggtgtaactatttctagattttctggtaaataaccaagtatttgtttaataagattatttttcttttccatatctgttggtaatgtttgattaagataaaaacacaaatcaaatgcctcatatcttttctttacaatttcaggattattatttgcatcatacaacatcccttgtttcattttttctaattcagtcatgttttaactcctcctttaaccattctaaccatatatcaaatcattaattgctataatataacaaaaaacttggagaacctgttatagcttgtcaattagtatactatgcattttcatctaatgaataaagtgctttttgataagttcaacttccaacatcggcaatgaaaattattttccatgatatatttgagtagctcatgcagccagtttctttccatttgataaaatatccaatattataatacttgttttttataatttcaataaaatgttcattggatttaatatataagctgtgatacttccatcaattgctatcaatcatcaaaaatgaaaacgtggcgtaatatcacaccacgtttttgttgttatctgtgttcaaattttttaatagatacatatgcacatgcagcacatactcctaaaatagcatatggaagaataaatgttgcatctttcgtctcaacaccttgtgatttatctggatttactcctgatgattcatttttatcagggttatttggtgttacttgactattaatatcatcatctttatcttgatttccaccattaggttcttctttatcttgatttcctccattaggattatctttttctactaattttaactgatcaattgcattttcaaattcttttaataaactttcaacttctaaacttgttagattttcatgatcagctaatacaaccttaactttttcaagaacttccttgaataccttccaagattcaacagtataatcttcttcttttttatctttattttgattataaagttcttctaaatcagttaaatctacaggaagtaattctaatacctctacagcatcttgaatagcttttatcgcagcatctatttcagactgaattgcccaatgttctccacgatcttcaatttgtactcttgctaatgctaaagcatcttgtaaagctgcccaagattcagttgtataattttctttatgataattttctttaacctcatcaactaattttaataatgcactaaaatcaacatcaccaggttcattcattggttgaggaatattatcctttgtaacaagaccaataaattgtcctttttgaccttcatctggttttgcaccaaatgtagcagtaccattttgataacttaataagaattgtctagaccagccttctcctttttctcctgtatctttatcaataccactacttactccattaccaacaccatttacaatagaattaatcttttgaagtgcactaccatcatttgcaaatgtttgaacacatgcattttcaattaatacatctttcttatttggaacttcaattgcattgtctaattggatttgtactttagaagaatcataatcttcacctgtattaataaatacattataaatacctaaaccaacagcataatgtttattaactttattagctaccttatatgaagaatatccattaacagtaccttcatgtgacatccaagcttcttgacttattggatcataagctgtttcattttgatagaaataagttgctccattatccccattccataaagtatgataactttggaaatgttcattaaataatgcataacaattcacattatcaccattaacaattaatccgtgttgtgattcatttccataccatttaacacctgcaccatgatcagcgcgccaaatccagaaatgatcaccaataacatcatcactattaataattaaagcatcttctgcttttgttaattctgaagtcgttccaccaattctaaagaataagtcagaaagtaaagttggattagctgaatgattcgtatgctttccttcatcaccaacttttaataaatattgagaagaagcaccagcatcaaaaacaaatccagaaactatgataccactaacatcagcaattttcattgctccttcaccattatcaggaataattgaagccattcctgtacctaataaaattgtatttggattattgactttaataacttcctcagcatgataaactcctggagtaaagaagatgttcataccatttttcaactgttcattaattttagccgcactatctccctctttagcaatatagaattcttctaatgataatatcttaccttctcccataccatcattagctttaccttcaccccaactaatacctgtactattttctctaatagctgggacaaaaatcttatattcactatcatcatctaagaataagaaaggtttttctctaactttaggtgtcttttcgacatttgttagtactttttgaggtttaccaatttcaccttctccccaatttgaataaccatttcctttaactaaaggactcgttgttggtaaattgtctgattgaacacccatattaaagttattcaatgttgttccatcaagtgttccattaattattgaatttcttgtaaaatattgttgtcctgatgcagtatctgcattacctgtaaaataacaatcagctgtatagcctccagaagcccatccaaaagaccaatcatatttcacattacgagtagaataaactcttctaagtggagcagcttgagctactgaccaactaaaagcatcagctgaccagtttgaagcacctggacaaagtggtgtcgtttctggaacagttgttgcttttccagtaccaactactgataagttttcagcagaacgccagaagttacaagttgcattacgccatgttgaaccatcatcccaataatttccgctgccttttcttccatctaagtaagctggtacctcaatattatttaatttaacatcataaggtgtttttcctagtccaccaatatgtgtataaaaaccaactggtacacaagatgtatcaacatagtttccaggtttataataaattgaatatctatttgtattaaactgtgcatcttttgataaatcattttgttgaataaatattttttgtactaatgcatcaatcttagctgtatcatcatattcagctaaaataaatacattttcaccaaataattgagtttctaatgaaacgtattcatctgaaatatcagattcaccattttcattaattgcaacaactttataataattttcatattgattttcatttgctgtcttatcaataaattctgtaacattttcaacatgtccaactttttgataaccatctttatcaaaagctgaacgtgcacgataaatatcataagcagttgctttttcaaccttattccatgtaatttgaatatcattatcctttttatgacaatctaatccaacaacttgtgctggtaaaggtccattcttagtttgaatctttacactttcacttgttgcaaaaggtccatctgcattcactgtacgaacagtaattgtatactcaacaccacgttgtaatccagttaatcttaatgatgtatcagttgtttcttttgaagtcacaacatcacttgaagatgtcactgaaggtgtagctacaactttataaccagtatagaaagtatcttgaacgcctttccaagaaacagtgacttctgtatccgtaatttggctgactttaacatcttcaaccttttttggagcatcaacagtacgaataataaattcaccttgtttatcatgttcttcagcattacctgttttaataatcttattatcgctaacagtaaaatattttccatcatctgttgctttaaatgaaattgttccattaccattaggtacaactctaatagattcccaaccaccatgttcagcaccagcaatttgtttaacttcagaaacacttccacttttccaacgagtatttggatattgcttagaattaaaagtgacacttggcccattccagttaccaaaaactggagtccatcttaaatcatcagcaatctttccatctacttttttaccatccactgttaaagcagtatcaacgccattggccttgacgtaatttccagtttctacatgttcaatatataaactaaaatcagtaactgtaggattttctacaaaacggaaaactagtgcctctttttcatcagcaacacgcttaattttatgagcatcaccaatactaaaataataatttctagtcatatctctgattgttcctaattgttcaccagtttttttaataatatattcacaacaatctgaacgtttttctgaatcagcaaataagaaatcatttccactttcagatctcattggataaactgcattctcttgtccaacataattcatcttaactctcacttcatcagcttctaaccctgattgatcagaaactttgacaaattgaaataattcagcattagttatcttgctgccttcttcaataaactctccatttacagttgtctgtgtttgccagccaattgcttttacatttaaagctaattgactttttacatcaactaatgcataagtgctttcatccttaatatctaatgcttcattagcagcataaacaggagtttgagcaaccattccaaccatcattgttaatgtcaacaatgatacacttaactttttaaaaagtttccttttcatttatgttcttcctttcctcatatttgacaaccgctattattttcaacgcaaagaaaagtggccaattcttctttgtatctaatcacaatatatatttatgtatgcggttacatctacatataaaatatcacaaaatattttatatgactatgaggaagaagtaaaatgtaacgggttacattttatgtaacaatttctatttttaatcaaatattcctacttgaaaatttaagtggtaaagccttttcttcactgttttgtagttctcttgttaccctttctaagatatataaaactggtacttgagttgaaatattatatgtttgaggtaatatcatatccttaacataataataaatactaaaatctgccatttgatcaattgtagtaccagctttatttgttattgctacaatttttatattcttagcttgatacatttttaattgatcaataatttctcttgtttccccactttcacttaagacaatcaataataaattacgtccattatcaattggtggaggataataaggatcttcaattccatgactaaaataaccaatgttagaaaaatatcttgccccatattttcctaataaaccacttgttccaattcctaaaaagaaaatagaatcggctttttgtacatattgaacaaattttttaatcttattttgaaattcttgactctttgcatattcaaagaaatcaaggatcatatcaatttcatcatcagtatgtggtaatatcattccctcatgaaacaactttaattttgttttaaattctacaaacccctgacaatttaatttctgacagaaacgaatcactgtcgcagttgaaacatgtgcttcatctgcaatatccctcacactcatctttataacttctggaatattttttattacatattgatagatatgtgtttctgtttcattaagacttgcaatctgcttataagtaaacaacaattcactcactcccttcttatcattttctaaatagtagtccctcatcttttaccaatatttccatttattattatactaaaaaagacaatagatggacacttataaaacaaaaaaatcttaccttataatcatcaaagtagataattctataaaaaagaatataataaatttggattaaaaatattatcttgaaagaagtgataaaatgataatagaaaaactattagatgaaaagaatttaactgaatctgaaaaataaattgctcattatctcttagaaaaatcccattatattaatcaattaacttgtgaagaattaggaaaagtcagtttcacctcgcaatcttcagtcagtcgtttatgtaagaaattaggatttattacttttcgtgaatttttaactagtcttatgattgaaagaaatgaatattttaaaacattaaactttacgacccctcttacttctcatctttattcatcatatgaagatacgcaaactaccatttcttctttatattttgaaacaatggttaatacaaatcttttattagataaaaataaagtcattagaatatgtaaccgtattatgagtgcttcttctattcatgtttatggaattggttcttctaatacaattgctcaacaaatggcctttcatttacaatctttaggtcttaactgttcttatcagaatggatttaatattgattatattgataaacttgatattaaaaataatgtttctattttgatttcattgacaccatttaataaaagtatgataagaatagcagaaattttatcaaatcatcatacttatacagtttcaattactagtaaagatgataatagcttagtggacatatgtaatgatagtttggtattttctacaaacaaggatcatgaagttaatcctattgataaagtatttgcgagtgaatatattattgatttaatatatgctttaattttatctagaaatgtttcatagaaaaaagatttctctttataacttcattgttatattgagaaatcttcttttttattgtgtttcattggcttgtttattttgatatctttcatagattaacaaaaatggaatataaatcaatgttgcaacaacaataacaataatctgtgaaatagctcccataatactaccacctgttgctaagaatcccattaaaattggtggcattgtccaaggaacctctagaacaatatatggacaaaaatgaatattaatcaataaccaaccaataaaaatacaaacaactggtgctaaaataaatggaatacctagaattggatttaaaactagtggaataccaaatgtcattgtctcattaatattaaataatccaggaacaattgataaagttgcaatagcacggttatcttcacgtttagagaaaataaagatagcaataatcaaacttaaagtaactcctgctccaccccactcagcaaacatactcatcattgttacattcatcgtataataaccatgtgctttaatttcaggtgttaaagcaattgtctttccttctgtgaataatgcagtattggcatataacattggacggaagattggttctttaatagctgctaacatattgctaccatgaataccaactaaccagaataatgaaatcaatacatacataaacataacagcaataatattatctccaataatatttaacaatggctgttgaatcactgtcttaattaaatcattgacatattgaccagttatagtctgaacaatccaaccaataagaccaaccacaaccaaagttaaaaatgttggaatcaaaacctcaaaagctcttgcaacaccaggtggaacttgttcaggcatcttaatttttaatgaatccatcttacggaatgcattataaatttccaatgccacaattcctacaataagtgcagtaaataaaccagtggctcctaaataatcaccactaaatcctgtgaaagttccaaccttactaagatcagtaacaccacttttcgttaaaacatctccaatggaaatagcatctccagcagcattcgttaagctacttgctaaaccagttaccacatgtgctgttggtgtaacaacaccccaagcaataaaaccaagtactgcagggaaagcccctgtctcaccattagcttcacctatttcttgagcaactagcataacaattcctacagaaatacaagaaattgtacaaaatgaaatagctgcaaatacagtattaattggtgctaaaaccataatcggtttaaaaagaccacctaatccttgagcatttccttgaacaactgtatcattaactaaaacatttgtccataaaacaccaatagctccagaaatagttgcaggcataaagttttggaatgcatttttaatggcacctaaatatttattttgaccaaaccatgccccaatacgacctagcctatcagcaaaagtatccataaatctttcctcccttataatattgatatcatcattatataccccctcatagagacatcaatattccttaaaatcattggtttagccatgcaaaaagatgtcattactgacatctttcatgctagatatcattcatagaatgaatcatatcttatatcttcaataaaatgataaggataagatggtagaatattaaaatatcataactagaaaatcaaaataaacttatatctttgtcaaaaatattttaagggtcttatttatagacgacatttgattcactataaatcatgaaatattcatataacatttcatcttttcattgtattgacaacaaataatcataaaaacttcttaataagaagaattctctctaaaaatagagagattcttcatgatttaacttgcttgacttgcttgtttattttgataattttcataaaccaataagaatggaatataaatcaatgtcgcaacaacaataacaataatctgtgaaatggcacccataatacttcctccagttgctaggaatcctaatagaattggtggcattgtccaaggcacttctagaacaatatacggacagaaatgaattgttactaataaccaaccaacaaagatacaaacaactggtgctaaaataaatggaatacctagaatagggttcaatactagtggaataccaaatgttactgtctcattaatattaaataatccaggaacaattgataaagttgcaatagcacggttatcttcacgtttagagaagataaagatagcaattactaaacctaaagtaactccagaacctccccactcagcaaacatctgcatcatcgttaagttcattgtgtaatatccatgtgctttaatttcaggtgtcaaagcaattgtctttccttctgtgaataatgcagtattggcatataacattggacggaagattggttccttaacagcagataacatgttattaccatgaataccaactaaccagaataatgaaatcaaaacatacataaacataacagcaacaatgttatctccaataatatttaacaatggttgttgaatcgctgtcttaattaaatcattaacatattgaccacttgtaatttgaacaagccaaccaataagaccaaccacaaccaaagttaaaaatgttggaattaaaacctcaaatgcacgagatacaccaggtggaacttgttcaggcatcttgatttttaatgaatccatcttacggaatgcattataaatttccaatgctacaattcctacaataagtgctgtaaacaaaccagtggctcctaaataatcagcaccaaatccagtgaaagtaccaactttactaagatcagcaacaccaccctttgttaaaacatcaccaatagcaattgcattacctgcactatcagttaaactactcgctaaagtcgttactgcatgtgcagttggtgtaacaacaccccaagcaataaagccaagtactgcagggaaagcccctgtctcaccattagcttcacctatttcttgggcaactaacatgacaactcctacagaaatacaggaaattgtacaaaatgaaattgcagcgaatacagtattgattggtgctaaaaccataattggtttaaagataccacctaatccttgggcatttccttgaacaaccgtatcattaactaaaacgtttgtccataaaacaccgactgctcctgcaattgtcgcaggcataaagttttggaatgcatttttaatggcccctaaatatttgttttgaccaaaccatgcacctattcgccctagcctatcagcaaaagtatccatattttttcctcccttataatattgatacgattattatatacccttgctaatagacatcaatattgtcgcacccctcttagctactccatgcaaaaaaagccaatattatttataatttttgcattgtttcattcattacattataaaaaaacatcttaatcgatatggattaagatgttaatttattattataaacctttttcagttaattctcttgctacatcatccttgattgtaacaccttctgcttctagttctgcaatctttttagcaaattgtggtaagtatttcttatgtgctattaacaactcatctaatacacgttttgcatttgctccagcaggaatttgtggatttaagataaatgcttgcaatgccattccataatctcctgtaactgctgcttcttctacgcagtgttccatgttcttcatgcattgtaaccatcctttttctgctggttgcaattctccaaaggctatggcttttgcccctgttgctccaatgtatgctgaaacttctacggcacagtctgctggtaaatctgggactgctccattattctttgttgtaacgacgatgtgtctattggcatttgaatagattgatgcgattgtttcacatgctgcatctgagtaatgtgctcctccacgttttgccaattgttctggtttatgatctaggtttggatctttatataattcaaacaattctgcttctgtttgttttacttgttgtccacgtgttcctttttctggatcattgaattcttccaatccatgtgccaacatttcttgttgacgatagtagtatctatgatatccacatggaatcatcttcattgtatctaattgttctttgaagaatggtacatcagcgatattagctggtaatcctccatcttttccttcatacattgcatcaatgatatcttgagtcacttcatttccatgttcatcatagactttatgccagtggaaatggtttaatccagcaaacttataagttaattgatctaatgtctttccaattgtttctggttctttcatcatagctccaactggtacattacataatccaatcactttttcccatttaccatatttcatgactgcttcggttaccattccacttggatttgtgaagttgattaaccatgcatttggacataattctttcatatcttctacgatacttaagattactgggattgttctgaatgccttgaagattcctccggcaccatttgtttcttgtcctagcattccataagagaatgggattctttcatctttgatacgagcatttaataacccaactctgaattgagttgtaacgaagtctgcatcttttaatgcttctctacgatctaaagttaagtgaactttaacatcatatggagatgcatcccacatacgttgagccattgccccaacgatttccattttttcttttccgtcctcaatatctactaaccagatttctctgattggaagttcatcatatcttttgataaatccttccattaattctggagtataactacttcctccaccaattgttacaatttttacaggtttcttttccattgaattcgtcctccttgttttttacatctacagtataaagccttgattaaaaaattgcacattattttcatcaattgaaaatatttttaaaacgttaacttatataatcatcatatccatttaaaatgacttataatcaaaaaataaaaagatagtcactgctatcttttaatatcggatcttccattttccataaaatcaataatttgttctcgactaacaataggactatcaccatatgttgtgtgcgctaaaacaccactaacagtcgcataatcaaccaatttagcacttggcatattatgaagataaccataaatagcccctgctgcaaagccatctcctccaccaacacgatcataaacagttaatgaatattcttgactcatggtaaaaacatcttttgacatcatataaccagataatgttttgtcttgacgaattgttcctaagatagcttcaatatgataatcatgacacatttgtttgagtagcaattctaattgttgtttcaaagggaggttatgatcaacgttcatttctaacaaaagtgtcgcatctttatatccagcaaatacaatatcagctaactgtaacatatcttcataaatacttttcacattttttctttcattttcatcccataaacttggtctaaagttacaatcaaaaataactttgatgcctctacgtttcgcctcttttgcaagtttaaaagcaacttctctaacattattattcattgctaatgaaataccacaaatatgaagtgcatcttgaccatctaaacaagataaatcataatctgatagttgactatgtccaaaagaactatcctttcgattcaaataagtcacttggctcgcacgatttccaatccctttttctaaaaaatagattcctatatgattatctccatagacaatatagtgatcattgataccaagcttacgaatattagcactggctgctttgcctactgcattatcaggtaatcttgttaaaagtgaaacatcttcacccatttgatataaccctgataaaatattaacgcctgttccagtaaacaaaaattctaattcattgacttgagttaacgttttatagtccgatggcatcatgcgcatcataacttctccaaatgctaatatcttcattatcttcacctactttgttaattctttcatgatttcatataattttttaacatcttctttacgtgtttgttttgtttctttatcaataattgatgaataaacatgaggaataactttttttactcctgcatttaaagcaatttcacaaatttctttaaagttatctaaatcaattccaccagttggttctaatataaaatcttgtctaacacaagcaagacaaacctctttatattcctcttttgttgataaacccttcattgggaagaatttaactgatgaacatcccatatcttttaacatcataatcgctgtatccactggcacaatcgcatcttgtccttcactacttaatggacctgttgaaatcttaaccattccaactgttccagttggtgaaatcaatccattaaccactgtatcattttgtccaagtaatgcacgagttgttccaactcctgtaaaaacttgattcacatgacgtggttgaatatattttgaaatttcacttaccatttgtgattgtttaggatcccctgctcctaaaccaacagaaatacaattatcagtaatagcagcatattttaacatatcttcaattgctgatgcattatcaggatagtttttagataataatcctaataaaatatgtccttctgttatatcatataatgcttttgcattttctaaactatttgttaaaacatttaaacaaatacgattatttaaataatttggtttcttttccattctatgcctccaaaatttcttgaatacgatgataaataatcatcaattcctcatcatcaacatctcttatatcaatttctatttgtccaagatttgctttataatcacgtgtataaatatgcacttcacccgtttttaaactttgtgcaatcttctttgcatcttgatgagtaaaggtaatttcacttcttataattggtctaccagcaccatcttgtacacatttagcttgtacaccatctaattgatttaacaaatgattaaactctttaagtcgatctttttgttgttcaattgttaattgtggttgattcatatattcttcaatcgcataagtaagtccaataatgttttccttaccaactttcatgattcttccaattccagcatattgtttcttgatcagatcaatataacttttcttacctacaatcaatccagaagttggaccacataatgcttttgttccactataaataacacattcagcccccatttgataatatttctttaaatcaccttcagctgctgcatcaacaataaccggtaaatcataggcatgggctaagtcaatgaattcttgaacatcaggcattcctttttggacacaatgatgtgacttaatatataataaagccactgtattttcattaatacaagctttaatactatctaatgtacattcattagcataacctgcttcaacaactttagctccacctaaacgcattgtcacctcaactgctgttccataattcacattatgtcctttacaaatcacaacttcacgtttactgtttgtcggatcataaagattcataatcttttgatagttatcttgacagatggctgcgccaatcgcttgagcaattcctccagaagcactattaacaatatagctgctttcaacatctaacaaattcgcaatatattcaccagttttatctaataaatctttgacttcaaagaagttaccagcgcctattccacattgttcaatgactttatcttgaacacgtgaaccacctaatatagtcatttttcctgaagcattaatcacacgactcacatgatattttgaataaatatccattacttttcctccccaattgtatagatttcattttttacaattgtatgtgttggaataatttgttgatgtgatatcacttcatgtttcattgaatcaactaatttcacatcttgatcaacaactttaaaaactgtaaaatcagcaatttttccaacctctatatcacctaaatttaataaattcaaagcctttgctgcattatgagtcacacaatttataactttatccaatgaataacctacatataacatcttattcatagttgtcactagactataaacgggaccatttaatctatttctaaaataaatatcactactaattgtattgacttcaataccttgttcaaaagcttttgatgcaacatcaaatgaaaaactatcactaccatgtcctaaatcaagaagaataccttttttcttagcttgatatacacaatctttaatttgatgattcttcaaaatcccattatctttaggattaaaaatatgcgttatcatatctttagcatctaacatattaacaacatcttctaataaacttggtgctgttccaatatgcaccattaatggtaaatgaacttgcttttgcatttctttcgcaaatactaatggttgatttccagaatcgcctaatacactcttagacattctagctttcaaaccaacaataaaatcaggatatttttgatatgctttgataatcgcattcttatctaaacgagataaatcagataactcattttgtgcacaaattcctgtacaagaaatattcaataaagagaatactctagtttttgccttttgtgcttgttgatataattcatcaattgtatcactgcctgcagtcccagcatctactaccgtacaaacaccatgaggatagccaattaaatcaggcttatccccataaatttcaaatttgtcaaaacaatgggtatggatatcaatccaccctgcactcacataatcatcttgaaaatcaaggatttcatagtttgattcaatatgtggagccacttctttaatgattccattctcaactaaaatatcaattctctttccattgactaattttgcttgtttgattacataatttttcacattcatcatttctctttcaatttaaattttgtccatgcatctacaaaatcaagtaaaaataattcttcatcaacaacttttcccactttattcttacgttcatcataacattcttctaagataatttgaagttctcctttatatttcccaaaattattattcccgattacaacatctccacattgaaaagtctgcatatgatcatgaagtggtatatcactttgagtatgtttctttctcacttcagttgaacgcactgcttgtttggtcatatcaccacgtctaaagtgttgttcattgaacataatatctttttcaatcgttgatgaatctgttaaaacttcaacacttaactctaattgataacgattgacttttgataaagcttctaattcttcacgtgatgcataagcatttccaataatcacatcatcaattaaatttgttgcaaataaatgtttggcttgtacatcaatgggtaaatctctatgcatttctaatgtacataatccatcattgattgaccaaggaccaagggttgcactatgagaatttataaaagcagctgttctaataccatgttttttaaaacgtgatgaacacttgacaaagaaatcataatctaagcctgttcctttttgaggatagaagttatgacatccatataaaaatggagcattaggctgatatgtcaaaatgttatctaagtaagcaacattatttgacatattgatttcaatcgctaattcataaggattaaatgttaacatagcttctttagctccatcaaacccaacatctaaacgaatcccagtggctcccatatcatgaaagaaacttaaatcatcatatgaaattcctagttgatcaaagactgctggagcaacatccaaaataacttcatatcctaaatcagtcgcatattcaattatctctttaaattcacgaacaatatcttcttttggtttattaactgacaataaacaagtaaagactcttgtaaaaccatattcactggctaactttaaataagctttatctttttctacagtactgtgttcaggatagatagatatccctaatgaccttttcatgcttccacctccccaggaatcttacgatgacgattataaatattgaaataacttgccataatgacacttccataaacaagaataataaaacattgtgggaataaaacaacaacagttaataagatgaacatatataacataatataaagaatcatttttaataatctggtttgaacttgatgcttttgataatatttttcactcaataatgttgtaataaagaaacaagctaatataccaataaatgttgagatttgaatcattttactttaccaaagacaatgtctttcctttctatgctttttctaaagatgcttcttctttttctaattgttgtttttcaaacattttaaagaatggataatagataaccaatgcaataataaagttaataataactaagacaccagccataattgaccaatctgttgacatgactgccgctaatggtgctggtaaagtaaatggcaatttggccatcattaatggaactaaaccagaaactgtaaataaataagaaacaattgtcataatgattggtgcgacaataaatggaattgctaagattggattcataacaattggtgcaccaaagataactggttcattaatattaaaaataccaggaattaaacataatctacctaaactcttaatatattgagatttagattttaagaataaacataccaatgcaagtgttgcgcctgcaccaccaatccatacaaaccattgtaagaattgttcagtaaagatatttggtaattggctagctgctgttccggcagcaaagatttccatattttcagcaattgtcatatcccaaattggtctaataactggtgacatgatagctggaccatgaatcccaagtacccagaagaaagtaattaatgtaactgtaatcaatccaccaattaaactgttaccagataaagtatcttttaatggcattaacaaattacttaatgttgcactaatatcaaaattaaagacataacgaataacccagaataaaagaataacaactgctgctggaattaaagcactaaatgaattagcaacttcaggtggtactccatcaggcattttaatcacaatattcttttctttacataaacgataaatttctacagcaaccaatgatgcgacgatagctccaaataaagaactcgcacttaatgcaccaattgataaatatcttccatctgcaataacttctggcataccagcagtcacttttactggaacaactgttgaaaccaagaaagcaacagtcgctaacataccacaacctaattgatcaagtttgtaatatctagcaagtgaagctccaattccataagcagcatataatgctaagatccctacagtaaaacgaaatggaacatcaataatgttaagatatggggcaataaattctgaataaccatcaattggaatattcaatagaatacaaaagaaagaccctacaatcgttaacggtaaagttgcgacaaccccttgtcttaccgcttgcatatgacgctgcccactaatcttaagcgccacaggcatcaatttttcttcaatcattttcataaacttttccatactatttctcctcgcctattttgtttacgtatacactataacattataatgtttatttgtaaagattataatgttatattttttataatttttaccatttttatatttttctatgttataataggtttacttaagtgaaaggaagatatatttatgaacgaaaaagtccctttatattattcaattatggaagtgattaaagattctattattaatggaatctacccaattggttcatttttacctactgaaactgaacttgaacaacaatttaaagtcagtaaaataacaattcgaaaagctattgaattattagagaatgatggttatgttacaaaaaaaagtggtaaaggtaccacagtgattagtaatagtatatttaataaattatctaatggacaatcattttcatcaatcttaaatcaacaaggttatcaagtgactaaagaaaatactgaatttgaatatatcacactcaatcctcaagatgatttattccaatattatgggcgacaatgtttaaagattagtcgttgttattacttggatggagaaccatatattcattttacccattatctccctggtgatattcaagttcctgatcaacaaaaactgaatgatttttctttatatatgtatctttatcaacataatcattcagttgctgattttaacgatgatttctttgtagaatttccaccccttgatattttaaaggctttacatttagaaaatggtccagttttaggtagaaagagaatctctcatgatatttatggaaaagtcgttgaagtctctcatgcccgttataatacgcgcattcacaattatcaaatccaatacaaaatctaaaaacagtttaactgtttttatttttttatagacttcgttttcttattatgatagattatttttacaaaaaagcgggaggaatgaaacatgaagaatatgactgttggaaaaccaatgaaattgattttcttatttgccatgccattgatgttaggaaatattttacaacaactttatacccttgttgatacaatgattgttggacagtttttaggggttgatgctttagcaagtttaggagctgcggactggattaactgggctatgttaggcattgtcatgggttttactcaaggattttccatccgtatttcttatgcttatggtgctcaagattttaaacgtatggaaaaaattatggcaatgattttaatagcttgttttgttttaggaattatattaacaattggcgttcaagttattattactccattacttcatttactcaaaacacctgataatattatagaaggttctataacttatttaagagttatgtcagctggagtattgattgttatgttctataactgtttttcatgtattttaagagcattaggaaatagtcgtacaccattgattgctatggtgagtgcagctattatcaatattattttagatttattatttgtttgtgtttttcattttgggattgctggtgctgccattgcaactttgattgcgcaaatggctgccgctttgtattgttatgatgttttaaaaaaagaacttccttttacaattcataaagaaagtttttcttttgattatccaacaatgaaaggacttattcaaattggcacacctttagcttttcaaaatgccattatttccgctggaggtatcgttgttcaatccgttgtgaatagttttggtttcttatttgttgctggttttacagcaacaaataaactttatggattattagaagttgctgctatatcatttggttatgcaattacaactttcaatagtcaaaacttaggagctaaacagtatgaacgtatgaaacatggtgtttttcaagccaatttattatcccttacgacttctttaattatctctatcatgatgttaatttttggtaaatccatcttattactctttatttctggtagtgttcatcaaatcgaagttgtcctttctattgcttttcgttacttatcaattatggctatatgtctccctattctttatgtcttacatacttatcgaagtgctttacaaggcatggaaaatacatttattccgatgttatcaggaattgttgaattaatcatgcgaattggtattgctttatttcttcctttatttattggacaagatggtatttattatgcagaagtatttgcctggagtggggctgccatcttactttatatcagttatcgtgtgaaaataaaagcttatttcaaataaacccaaaagcgtatttcatcttttgggtttattttttactttttattcttttgtgcataatatttacgaactaaaacttgtgtttttcgaatatgtttttgaattgtttctttagcttgttccttatccccagccatgattgcatgtaagattgctcggtgttcttttaaagctgtttctaatctttctggttgagtaatagaatgacgactcgttactgaaacataataatgaacatcttttaataattgttcaaagtattgtgattgagttgcctgataaatagtttcatgataaagaatatttaaatcattaattttatcctgttcatttttacctgtataaaattccattaattcaaaaacatctttaatcttagcaagatgaacttcatccatgcgatcaatggctaattgaatagcaagcccttctaaagccaaacgaatttcaaacatatcatcaatatctcttggtgaaaaaccttttacataaacacctttgttaggaatactttcaaccaaaccttctaattctaattgttttaaagcttctctaataggtgttctacttattttcaactcattagctaaagctaattcatttaatttttgtccatgttcatattcatcatttaaaatacgatcccttaaaatatcaaaaatcttatttcccaatgaaccatgtgttacttgatcaaacagactatgagatggcatgcgactttcctcctataatttttcaataatcgcttgggtaaatgcactggttgatgctgttccaccaatatctggtgtaatcgtatgaccttcttctacaactgcagctaaagcatttctcaaacgatttgcttcttctaattttcccaaatcttccaacattaatgcaaaagctaataataaagcacttggattagcaatattctttcccgctatatctggagcacttccatgaacggcttcatatatacgatattcatcaccaatatttccacttggtgcaaaacctaatcctccaattaatccagcacataaatcagaaacaatatctccatataaattaggagcaaccaaaacatcaaatgtttcaggtcttaaaacaagttgcatacacatattatccacaatgacttcttgagcttcaatttctggataacattttgctacatctctaaaagcttctaaaaagagcccatctgtatatttcataatgttagctttatgaatagctgttactttatgtctgttgtttattttagcatattcaaaggcataacggcaaatcttttcgcttgcttcacgtgtaattaatttcacaccatttgccatattatcattaatcatatattcaatgcctttatacaaatcttcagtattttctctaatcataaccaaatcaatattttcatatttagaattgattcccttaaatgaacggattggtctaacattggcataagtttcaaattgttgtcttaatgcgacattgacacttctaaatcctgttccaattggtgttgctgttggaccttttaatgcccatttgtattctttgatggcatctaccaatcctggttcaaaaacttcttttgttttggcagcgtattctgccccagcacgatatgtgacccattcaatatcaagtttcattgcctgggtaatattttcgacactcttagcaatttctggaccaattccatcccctggtattaatacagctttcattaaaaatctccccctaactctttaatagcatttaacaaaccaccttgtagaatcatgactttttctcttggtgctaatgttaatttggctgtaattgtttcatttgttgtttgatttttcacaacaacatcttttccttgttctacggcttctttaacatttaataaaatatattcatcttgatcattaaagaaatcgtagccttgttgatcaataaccaatggtaaaatcccattattaattaagtttgatctatgaattctggcaaaagataatgcaaagattgctttaatctttaaataattaggaactaaagccgcatgttcacgagaagacccttgtccataattatctcctccaacaataaatccaccaccattttcaattgcacgattgtagaattgatcatcaactttacagaaagagaattttgctaaatgtggcacatttgaacgatatggcaataatttagaatcagaaggaacaatatgatcagttgagatattatctccaacttttaaaacaacttttcctttgatttcattaactaatttatcccctctaggcactggtttaatattaggtcccatataaacttcagtttgtggatcatattcattaataaagaaatttgtattcttaataaatggtgtgcttggcacttcatctaaatacatatcatcttcaaattcacatgatagatatcctttaattgcagataaagcagcaatttcaggtgatactaagtaaaccccagcatcatttgttcctgaacgtcctttaaaattacgattaatagttcttaaagaaatcccttttgataaaggcgcttgccccattccaatacatggtccacatccacattcaagaattcttgccccagcatgaatcatatctgctaatgcaccattttctgataacattgctaaaatacttgatgatcctggcgcaataactaaagaaacatgttctgcgacttttcttccttttaaaattttagctgcacgcatcatatcagcaaaagatgagtttgtacatgaaccaatcacaacttgattgatgtgcataccttctagctctttcacatcaacaactgcatcaggactatgtggttttgcaaccattggaacgagagtagataaatcaatatctaatctttgatcataagttgcatcttcatcagctttcatttctttaaaatcagcttcacgtccttgttgttttaaataatccaaagttctttcatcagttgggaaaacggaagttgttgcccctagctctgctcccatattacaaattgttgcacgatcagttaaagataaagttgctattccttctcctgtatattcaacaattttgttcactccaccttttacacttaattcttgtaaaacttttaaaataatatctttagcactgacccatggtgctttctttcctgttaaattcacttgaatcactgatggacattgtaaataatatttcccagttgccattgctactgctacatccaatcccccagctccaatagcaatcatccccatagcaccacaagttggtgtatgagaatcactaccaactaaagtttgtcctggtttagaaaaattctctaattgtaattgatgacaaactccattccctggtttagaaaaagttatgccatgttttttagcaacacttctaataaattcatgatcatccatattttcaaatcctgtttgtaacatattgtgatcaatatatgctactgctttatctaccgctacatgtccaacttccatagcttctaattgtaaataagccattgttccagttgaatcttgagtcaaagtttgatcaatttgaatacaaatttgttctcctggtacaagtttcccctcttttaaatgcgaatttaaaattttatatgctaaattcattttctatcacccttcctttattgtatacaattatacaagattgtgtttaaacacgcaataagatatttatttttatttagatattcttttcttaagaattgatatcaataaatatttactttaagcaattgataaatgtttgctttgtgctataataggagtgaatcaaaaaactttttcaacttttttgccttaaaaagaagaaaaatgagactttgcaagcgtatatataagtataggggttatatttccttagagtttctcaactataaaaaggaggaaaatctatatgataaatacgcttacatatcaagaaccacaacaacagtccaaacaggataagattttaagaggattctttaaggtcaagacccattttgccgatatcatcaatgccatgctttttgaaggaaaagatgtcatccatgcggatgagctgcttctatgcgatagtgatgaaacaatttattttgtctatgagaatagaatcaatgtcatggaaagacggcgtgatatattgatgcatgcaacagtcaatgggattcctgtttacattggacttgagattcagtcaacgattaactattccatgccgtataggctgcttctctatgatacaatgacctatcatttgcagtacaagctgatagataaggaccatagggagcatttcagacctacgggagtcatgagtacagttctatatagcggagacaggacatggcatcaaccccattcactcctggatcgtattctggttccagaaccgttgaagggactgatgaacacctggaaggggaatattcatgatatcaaggagatcaatgtagagttgctcagaaatgagaaggtgaaatcactggtcagtgcagttcaaacaatctatagatggaacaaggatacgagcacaatcaaggaactggtgttaagcaaagaggttgcgatagtcgtagcagtcatgacaaacagtgaagaactagtcataaggatagagaaagaagaaagggaggaagtagacatgtgtcaggtactagaggaatttaaattagaaagtgaaatgagaggacttgaaagaggtcgtagtcttggattgaaacaaggattggatcaaggagtaaaacaaggaaagatacaaaccattgtgaatgtaataaaaagcaaatttggatttgtatcaaaggaactgattatgaagatagaagaaagttcagatgataagatagatgctttaacaatcaagattattgatgcaagaagtgaagaagaactgatgaaagtattgtcataaataattataggttaagaataaagcaaaaatagttctagctaattatttttgctttatcattttgttatattatataagtaaatatgaacttatacaaagaagtaactatggtgacaaacagtgaagaactagtcataaggatagagaaggaagaaagggaggaagtagacatgtgtcaggtactagaggaatttaaattagaaagtgaaatgagaggacttgaaagaggtcgcagtcttggattgaaacaaggaatcaaacaagggttgaatcaaggaatcaaacaaggaatcaaacaaggattggatcaaggagttaaacaaggaaagatacaaaccattgtaaatcaactaaaaagcaaatttggatttgtatcaaaggaactgatcatgaagatagaagaaagttcagatgataagatagatgctttaacaatcaagattattgatgcaagaagtgaagaagaactgatagaaattttatcttaatacatataaaaagagtaagtatagtctcaaaaattgactaacttactcttttttataattctatcctatcatcaatcaattaatattttgaataaataatgaaatatgatacaatagttgcggtgataaaatatgatattagcatgctcatctttaaaaaaatcatttcaaggaaatgatttacttaaagatattacatttaaaattgaagatcatgataaaatagcaattattggagtcaatggtgctggaaaaacaactttactaagaatactttgtgaggaagaaagttatgatagtggagatatttttaagtctaaagatgttgtaattggttacttatctcaacataatactttagatccaacactgtctatttatgatgctctcttagatgtctttaaacctttaattcaaaaagaaaaaagaattagagaattagaagccatgatggcatcttcttcacaactagaaaacattatgaaagaatacgatcaattaacttatgaatttgaacgtgatggtggttatagttatgaaagtcagctaaaaggtgttctcaaaggattaggttttggtgaagaaacatggtcaatgaatattggaatcctttcaggtggacaaaaaacacgtattgctttaggtagactcttattactaaaacctgatttattattgcttgatgaaccaactaaccatcttgatgtagaatctattgaatggctagaaaactatttaaaaaactatccacatgcaatcattatggtttctcatgatagatactttattgatcaagtaacaaatcaaatcattgaaatagaaaatggaaaatcaacactatatagatgttcttatgatcaatatgctttattaaagaaacataatcgtgaagtagaattaaagcattacatagataatcaaaaagaaataaaaagaatgcaggaaagtattgatttattaaaatcatttaatcgtgaaaaacaagtcaaacgtgcagaaagtaaagaaaaagcattagagaaaatggaaaaagttgaaaaacctgatgctatgccacaagcaattcgtatacaatttcaaccacttgtagaatctggttatgatgttttaaaagtcaaagatttagctatgagctttgataagccattatttgaaaatgttcaatttgaagtcaataaacaagaaagggttgcattaattggtcctaacggaattggaaaaacaacattattccatatgattttaggtgattatattccacaacatggaaaaatcaaattaggaagtaaagtcatgattggttactacgaccaagaacacacatctttatctttccaaaaaacaatctttcaagaaatcagtgatacttatccacaaatgaataatactgaaattagaaatgcctgtgcttcttttcaatttaaaggtgaagatgtttttaaaacaatggatatgttatcgggtggagaaagaggtcgtgttgttttaatgaaattattattatcaagatgtaatttcttaattcttgatgaaccgactaaccatttagatattgaatcaaaagaagttttagaagatgcattaatgaactttgaaggaaccattctttttattagtcatgatagatatttcattaataaattagcaacaaaagttgttgaaatgagttctcatggtagtcatacttatagtggtaactatagtcaatacatagaaaataaacaagttaataaagtagagaaagaaaaaaatgtttcttatttagaaagtaaaaaaatacaatctgaattaagaaaacaacaaaatcaaatcaaaaagatagaaaaagagatatctgatttagaattacaaatcaaacaatacaatgaaatgctacatcaagaagaaattttaaatgattatcaaaaatacaatgaaattgtaaaaaacattgatgaagccaatcaaaaattagaaacattgatggaatcctgggaagaattacagatttaatgaaaagaaatagacaagcgctatttctttttttatcaaaaaagaataatccataatgaattattccctttcttctcttgtaattttaattgtattttctaaatagctgtttaatatttcggctttcattttcattcgattaacagccaatgtttcataaacagcacaatatttatcagctaacatcacaatataactttctttaaatcttggtggcttaactgttaaaggaaccatatgttttaaaataatatcccgttctttttcgttaagattaaaatccactcttgcattctcataagcataatgtgggtgtttaaatgcatgattacgatttgatgatgaaggaacatgccagtcatataaaaaataatcatgtaataaagcacctctaattaaacttcttacatcaacatttaaccgcatttttttagcaataactaaactcatataagcaacaaacaacgaatgatcataacaacttaatccaccatgttgaataaaactcttttctcttaacatgttttgtgaacttaaaatatcaattccatgttcaagtaataatcccattggtaaatcatagtacacaattatcaccctctcttgttccaatatcattgtatataaagttatgttttttttcaataaatataacttttattttttcaacttttgtaaaaataatcacaaacaaatcattatttattataatgatagtaatcataaaataaaggagagtgtcaaatgttacacaaaaaattaaaagcatttcctcaagattttctttggggagcaagtacatcagcttatcaagtcgaaggagctaatctagaagatggaaaaggtccatcttgtcaggatgttaaagaagtaccagaaggaacttcagatttaactgtctgtgctgatcaatatcatagatataaggaagatattgccttaatggcagaaatgggattcaagacttatcgtttctctatctcttggtctcgtatcattcctgaaggtactggagcagtcaatccaaaaggaattgaatactataacaatgtcatcaatgaatgtttgaaatatggaattgaaccattagtcactatgttccactttgatatgcctgcggcattagataaacgtggttcttggtctaatagagaatcagttgactggttcttaaacttcgctaaggttatgtatgaaaactttggagacagagttaaatattggttaacaatcaatgaacaaaacatgttgactctagtaggaccagttattggaacattaacaatccctgaaggatgtacaaatgaattaaaggaaatctatcaacaaaatcaccatatgttagtcgcacaagcaaaagctatggcgttatgccatgaaatgttaccaggagctaagattggaccagccccaaacatttcattagtctatccagcaagctgcaagccagaagataatttagctgcacagaattataacgctattagaaactggttatacttagatatggcagtctatggtgtttataataacttagtatgggcatggttagaagaacatgatgcaacaccagaatttgctgaaggagacgaagaagcattaaagagtggtcatccagacttcatcggattcaactactacaacacagcaacatgtgagtgggatgatggaagtgaagaattatcacaggcagtcgatcaacagacagcacgtggagaagcaggaatgttcaagggattcaagaatccaaacttgccaacaacagaattcggatgggaaattgatcctatgggattcagagcaactattcgtgaaatgtattcaagatatcgtttgccaatgatcgttacagaaaacggattaggggcttatgataaattaacagaagatggaaaagtccatgatcaatacagaattgaatacttaagaaaacatatcgaacaagtacaattagcaatctctgatggatgtgaaatgatgggatactgtccatggagtgcagtggacttaatttcaacacatgaaggaatggttaagagatatggattcatctatgtagatagagaagaatttgacttaaagacattagatagatatagaaaagattcattctattggtataaaaaagtcattgcaacaaatggggaagatttatcagattaaaaagtagaacttgtcattttcgacaagttcttttataataccacaaagaggtggttctatgaaaaaaataaaatattttattccagctattattttaatgataattatcttttccttttctcaacaaacaggtgaagaatcttctggattaagtagtcaaattgttgtatggatacaaactcatttacatataacaatttctgaatttcttattagaaaagcagctcatatgagtgaatatgctttgcttactagtacttttatttatggtttctatcactgtgattactcacttaaacaaattcttttattctctttatgtgcaactttcttatatgcatgtagcgatgaagcgcatcaattatttattggtggacgtgctggtcaatggagagatgttttgatagatacaagtggtggcgtgattgcttcaatcatttattattttattcatccatatataaagaaaactcactaattgaaagtgagttttttattcgtaatttaataagttatgttttttcaaaataggtttaaatattttcataaatattcctaaagttggtccaaaagttaacataccaataattgttcctaccccaattgaccatgatatcttaaaaataagcgttaaaatgacaactgcaataacactcaaaatatcagcaccttgtcttacaatatgaaatttagcagaaattacattcgtcaaagccatacaaaaaccttctaatgcaaaagtcacttcatctagtagcataacaatagatactccaaatgcacagactgtacttcctgcaatatacatcaaaattccaccagcaaatgaattaaattcaaatgtaagtacctcatacaatacaaaattaatcactactccaagtaaaacacttaatggaacttgtaataattgaattggtttaaacttctttcttaaaataattatttgtccaacaacacatgaacaattaaaaacaattcccattgttcctacttcaatcccaaaaatatcagaagatgatttagctagtgcatcccaagctcctactccaatatttgccttcaaagtaaatgcacaagcaattcctacagtcataaaccctaaaactatcaatatatatcttttaatacttttattcatctctttccctccatagtgaggtctattatatcggaaaattttaatttgaaaattaaatttcataaattgaaaaaaataataagtcttttttgacttaccattaatttatctttttctccattaaataacgtcttaaacgaatgccccttctttccactgtttgttcttccaaaacaagatatccttgtctttcaaagaaaggtcttgatgtaatagaagcagctgtattcatataaacaattccctttgctttcgcatatttttctaattgtttagtgatgagagtggctattccttggtgtaagtaatctttatgaacatacaatctatccaaatatcctgtctcaccaacattgccaaagccaacaatctttccatctttttcaacaacaagggtatgattcttatttaaagaagcttcccaacgataaatatcaggatcacttggtgcccaggcatctaattgttcaagcgtataatcattaacacatacattatggatgttttcataaaataactgtaaaacttcttgtaaatctgtcggtttatatagtcttgttttcataaatatcactcctctgtataaaatattatagcataatcaaaaaaaataagaaaggaagtctattcctttcttactagattccaaataataagtctaaatatgttggaattggccagtatttagcatctactcttgtttcaataacgtcaacagtttcacgcaatgaattcattgcagcaaagacatgatcacgccataaaatagattgttgtaagatatcctgatgacaatcttgagcttctttaataaagctatctaattcatccatttttttcttcatttctgccaataattcagataaatattgaacatcttccatcaaaaattcattattaacgccagcttgtttgacttctaatgcggtttttgtaatatcacttaaatattgaatagccgctggataaatttcatttcttgccatttttgaagccgtcaaagcttcaacttgaattgttttattataattatcaagtaagatttcataacgtgaatcaagttcaacttcactataaattcctaaacgagataacatttcaatattcttttcatcttttaaacatagcatagcatcgacagtattcttacgatttggtaagccccttctttgtgcctctgcttcccattcagctgaatatccatcaccattgaaaataatacgtttatgctcagccataaaatctttaatcacttccattggtgtctttccactctcaattaaatcagccatttcttccatttcagctgctaaaatcgcatttaaaatcgtattaggtccagcaatagattgtgaagaaccaacccctctaaattcaaatttatttcctgtaaaagcaaaaggagatgtacgattacgatcagtattatccttagaaaaatcaggaataactgataccccagtttggaatctctctgaacttgtatcttccaattctttacgatcagtaatagattcaataatatgatctaattcttcacctaaaaacatcgaaataatagctggtggtgcttcattagctcctaaacgatgatcattaccagctgttgcaattgtcatacgtaataaatcagcatactcatcaaccgctttaattgtacaagccaaagttgctaagaatggtaaattatccacaggattatcaccaggatcaaataaattcacacccgtatttgtaacaactgaccagttattatgtttcccagaaccattcactccagcaaatggcttttcatgtaacaaacatcttaatccatgctttttagcaatatcttgcatcaattgcataagcaaatgattattatctgtcgtaatatttactttacgataaacacatgcaacttcatgttgagcaggagccgcttcattatgctttgtctttgaaggaataccataacgccataactccttatccaaatctttcataaaagctgatactttccgttttaagctaccaaaataatgatcttctaactcttgaccttttggagccattgccccaaataaagtacgcccagttaattttaaatccattcgtttttgataaaactcatcagcaactaagaaatattcttgttcacttcctactgatgctgatacacgtgtaataccttccattcctaacaatggtaacaaatgacatgatgcctttgtcaaagcatcaacagattttaaaagtggtgttttcttatctaatgcttcacctgtatatgaacaaaataatgttggaatatataaactttcatcttttacaaaggctggagatgtacaatcccatgctgtatatcctcttgcttcaaaagtcgcacgtaaacccccagaaggaaaagaagatgcatcaggttccccttttcttaaagtctttccactgaattctaaaacggctttattaccatcaggttctaagaacgcatcatgcttttcagcagttaatcctgtcattggtgtaaaccaatgtgtaaaatgtgttgccccattttcaacagcccaaatcttcattgcattggcaataacagttgctgtttcttttgctaaaggttctccttttgctaaggcttcatgaaaagctttatatgtagatttaggaatacgttcacgcataacatcatcactaaatgttaaacaaccatattcttctagtaatttattcatttccattgaattcaaatcccccttatctttgcacccattgtatcaatttctgttagtcatgtctataaaaaatcttatttaattttatcataatgataaaattcttaacaaagaaatgatcgaaaagattgtatttttttaacaaaggtctatacttatagaggggtgaaaaaaatgtttagtcaatttaatacattaattattcatagcaattctcaatttaacaatcaaataaagacttacttagaagataaagaatatctttgtaatcaaattagtcaatttaaagaatttgctgattattatgaaaaccatacttatgattgcattattatcgaagatgaatttccacgtattaaaaccaaagaattcattgtccaagctaaattaaaaggacaaccaatcattattgttttaacagatactctttcaccagattatcttgaatcattattaaatgcaggagctgatgattatctagttgaaccatatgatttaaaagatttagataccaaaatacaatcagtctataaaaatggaatcttaagacctagacgtatttatcgttttaaagatattgttgtagatacaacatcaagaacttgttcttgtaatgggaaacctctcaaccttaccaaaaacgaatttaaacttttaacaatactcatatcacatccataccaaccatttaatatatcttatttatttgaacaagtttggggatcttctatctatgaagatggaacatctattcctgcacttgtcagcaatctcattatgaaattaagattagcaaataatgaagaagaatatattaaacgttttggtagagataactataaaatggcattttaaaaggaatcagaaattaatcattttctgattccttttgcattttctcttttgcttctcttttctcagcttttcttttttctttacgtgctttcttttctaattttctatgaacatcagtgtattccttaactgtacagtgaattcttttatttgctttgactacagcatcaacaaattcaactctaccaacaggaaaacaacaataacgttttttagtatttgtataaatttcaattgcatgtggacgagtcactaaatccgccattcttggaacaggatcacagattgtttcacattccattaaatcaacatgactattcttccataaacgataatgaattgttaaagttcttttctcaattgaatatttatatggtctacaccctaagaaaaaagcataacaaataacaccaaaaacaataattgtaataattgtagaagtgtcttgtgtaaagattgtaaaaagtgtatacaatgcatacgcgattaaaaagataaaagtcgccgtattcattcttactttgaattctttgatttccataaaatgcctcactttcttctctattatacatgaatttcatttctttgacaatctcacaatgataatagatgaagattaattctttaaaaaaaggacggttaataaccgccctttaacattcatattgtacttaaatatcttattcagcagcagctgcttgtttgttttgatatttttcgtatgcaattaagaatggaatgtaaattactgttgataaagcaattacaataatttgtgatacagcacccatgatgcttccacctgttgctaagaatcctaacaataatggtggcattgtccaaggtacttcgattacgattggtggacagaatccgatagttactaataaccaacctacgaagatacaagctactggagctaagataaatggaatacctaagattgggtttaatactaatgggataccgaatgttacagtttcattgatattgaataatcctggaacgatagataatgtagcgattgcacggttatcttcacgtttagagaagatgaagattgcaataactaaacctaaagttacccctgaacctccccattcagcaaacatttgcatcatagttaagttcattgtgtaatatccatgagctttgatatctggagttaaaggaattgtttttccatttgtgaataatgcagtatttgcatataacattggacggaagattggttctttaactgcagataacatgttgttaccatgaataccaactaaccagaataatgaaattaatacatacatgaacattactgcaacgatgttgtcaccaataatgttaactaatggttcttgaataactgttttaattaagtcattgaagtattgaccagtagtcatgtgtactaaccaaccaattgttccaactacaactaatgttaagaatgttggaattaaaacttcgaatgcacgagatacacctggaggtacttgttcaggcatcttgatttttaaagtgtccattttacggaacataccataaatttcaagagctaagatacctacgattaatgcagtgaataacccagttgctcctaagtaatcaccattaaatccagtgaatgttccaactttagttaagtcagctacgccacctttagttaaaacatctccgattgagatagcatctccagcggcattagttaagctacttgctaaacctgttacagaatgagctgtaggagtaacaactgcccaagccatgaaacctaaaactgcagggaaagcacctgtttcaccattagcttctccgatttcttgagctactagcattacgataccgatagaaatacatgagatagtacaaaattgaattgcagcaaacacatcgttaattggagctaaagccatgattggtttaaagataccaccaagaccttgagcgttcccgttgacaacgttatcattaactaaaacgttagtccaaagaacaccaatagcacctgcgatagttgctggcatgaagttttggaatgcgttcttgattgatcctaaatatttgttttgaccacaccaagcaccaacgcgtccaagcttatcagcaaaagcgtccatatttttttcctcccttaaaatatttttgacactaatagtataagatttatttaacaaaaagtcaatgcttttaatttaaaagtatggtactttttcaaaaaagtaccattttagggcattttttttattcatttttttcgacatttttttaaaatatgaaaaaaatcatgaaattttcatgatttttactgttgtacaacgattgtttgaaactcaaattcagcataatgatgtcttgctaatgtgtattcaaagatcgaaccattgcttaaatatgaaatttgttcttcttgaatatagggttcattttcttttaaaccaagatattgttgttctaaaggagtagataaagcagcattaattgttaaatgacagctttgaatctttaactttaaaactttttctatatattcataaatagaaccctttaaatgttctaattttaaattaggaattaagccaataggcatataactaatatccaaaagatgtggtttacgatctaaaaaacgcaaacgaatgatatgataaacaaaatctcctacttcaatctgtagtttcttagaaagatgttcatcagctggaatcacttcaaaccctaaaacttcacttgttacttccttaattcctgcatactttgccgttaatcctctagcaaatttatttgttgagctttccaaagatggatcataatctttaacaaacgttcctgccccacgacgacgaataatcaatccttctttgacaagaatatccaaagccttcttcattgtttctttattacagtgatagctcatacataaaacatattcatatggcaatttttgtccaaaagtatattcaccacttttaatcttttgccgtatgtcatcagctatatctttgtacttagccatgaatatcacctcaccataataaaaataccatacttttactttaatttcacggtttttttatatttttttaattattttataattttatactttgtaacaatgttttttctaatgaaaaaatctttaattcatgattttcataaactccaaaactctttcctcctgcttttggtaaagagatagaagatggattaaaaataacaattccatcttttttcttagctattggtttatgataatgtccatacatcaagatatcccctgattgaagtaaaggcatatgatcttcatcatacaaatgaccatgtgtcataaagaaatgatgtccatcaatataaagttcactataatctgctcgcattggaaaatctaagaccatttgatcaacttctgcatcacaatttccccttaccgctataattttatctttatattggtttaataatattgcaacttctttaggttgatacccctttggtaaaggatttcttggaccatgatacaacaaatcccctagcaatatcatacgatccatcttttcttcttcaaagatatcaatcactttctttaaatcatctaaagacccgtgaatatcagaaataatcatccatttcattattccaacccctccaattgcactcctaccgggcaatgatcagaacccataatatcagtataaatataggcatcctcaatattatcttttaaatcctgagaaacaacaaaataatcaatacgccatccagcattcttctctcttgccttaaacatataagaccaccaagaataaacttccttatcaggatacttatatctaaaagtatcaataaatccagaatctaataattctgtaaatttcgctctttcttcatcagtaaaaccagcattcttatgatttgttttatcgttctttaagtcaatttcctgatgagcaacatttaagtcaccacaaatcacaactggtttattcttttttaaatcattaacatatgttctaaaagcatcttcccagacttgacgatagtctaatctttctaactctcttttagaattaggggtataaacagtgataaaatagaacttctcaaattctaaagtaatcacacggccttcttgatcatgttcttcaatgcctaagccataagtgacatgcaatggttgtttctttgtataaatagcaaccccactataacccttctttatagcatcattaaaataagatgtatacccatcaaactctaaatcaatttgtcccttttgtaactttgtctcctgtatagcaaaaatatcagcattcacttctttaaaaaaatcactaaaacctttattcacacaagctcttaatccatttacgttccaagatacacataacatcacttattcctcctttagacaagaaaaggggttaaaccccctcctctattgcatatctgacaattgtctttaatttctctgttgcaaccttttctgaatcatttaaataaatctcatgatgcagaccaatcagtttcattccttgaactgtgatatattccataatttgttttgttgtatcaatctctgtattataagcacctttatgcatcatctgtacacaacggccttcttccattttcttaagataagcatcaacaatatatggattatctcttttagcagcaacatactctttaatcatttcaaatgttttttcatctaaaatcttaggttgggcaatcatcaatgtaaacttaatcatcttttttcttgtaacatcaaactgactattatcataagtatcccataatccttctaatggtgaaattaaatataaaagatccatctcttgtttaaaataatcttttatagcttttgataatatatgtaaagcatcagacttcaatttaaattcttctacatttggattcccaattccgtcaatcataacaaaattgaattccggcacatcaacaacatcaattctttttgttgaagcatcgtattgtttcttatactctttcctaatgccttctttcactaaggaattcctcctttcacttgccctaccattatatataatttaaagagaaatttccagctaaatttaggatttttttattttttatcacaataattttcatttttaacacaaattaattatcgtttttcacaaaaaaatcttttagatttctctaaaagattagctttcatcccataaaacaagacttttttcactttttgattttttcatatcaataattctttgattctctgaacccctaaatttcaaacgaatatttttcttatctaaaataaaaggtccatcaactaaataatcaatataactcaaaagctcatcagtaacatcacaatgaacacgtccaccagtcaataaatcttctaagacataaccagtataacaccaaacatccttatctggataagtttgatgaaactgtcttaataaaggcaataatccttcttgattagttggttccattggttcacctccaagtaaagataaccctttaatatgaactggtttcaatgcttccataatttcatcaattgtctcttgtgtaaacggttgtccataatgaaaatcccaagccacttcattaaaacattctttgcagcggtgggtacagcctgaaacaaagagtgagaccctcactcctgttccatttgctatatcaactttttttatctttgcgtagtacatttttataagtggagaacacgttctttaatttcttgtgttcttccttgattccagaattgtgttccaatataaccacaagtacgtctggcaacactcatcttatcttggtctgtatttccacagttaggacatatccaaattaacttaccatcatcatcttctttaatttgaatttcaccatcatatccacattccatgcaataatcacattttgtatttaattctgcatacataatattttcataaatatgttgcataactgctagtacggcatctaagttatcttgcatattaggaacttctacataactaatggctccacctggagataattgttggaattgagattcaaatgttaattttgtaaaagcatcaatttcttcagtaacattcacatgatagctatttgtaatatagtttttgtcagtaacacctggaatcttaccaaaacgtttttgtaaacatttagcaaatttataagttgttgattcaattggtgttccatataaactaaagtccatattttcttcagctttccattgtgcacatttatcatttaaatgttgcataatttctaaagcaaaaggtgtaatttctggatctgtatgagactttcctgtcatatatttgacgcattcacaaagtccagcatatcctaaagaaattgtagaatatccaccatataataatttatctaaagtttcaccttttttaagtcttgctagagcaccatattgccataaaattggagccacatcactaggagtcccttttaaacgattatgacggcacattaaagcttctttacataaatccaatctttcatccataatacgccagaactcttttaaatcacccttagatgaacaagccacatcaaccaagttaatcgttacaactccttggttaaaacgtccataatatttagcacgttgtgtatcaggatcaacatatggagtcaagaaactacgacatcccatacatgtataacaatgtccctcaccatttttatcaacctttaactctaacattttcttttcagaaatataatcaggaaccatacgtttagcagtacatttagcagctaattttgttaattcccaatatttactatcttcatgaatattgtcttcttcaagaacatagattaatttagggaatgcaggtgtcacataaataccttgttcatttttaacccctaagattctttgattcaatgtttcttcaataattaaagctaaatcttcttttgtttgtccttcaggaacttcatttaaatacatgaaaactgtcacaaatggagcttgtccatttgttgtcattaaagtaatgacttgatattgaatcatttgaacaccacgattcacttctttacgaacccgatattctgccaattcattaatttgttgctcagttacttcaataccttcttgttcaaattcttcacgtacttcttttcttaatttttgacgacttacatcaacaaaaggagccaaatgagctaaactaatactttgtccaccatattgagaacttgccacttgtgcaataatttgtgtagcaatattacaagctgttgaaaaactctttggtctttcaatcattgtttcactaataactgttccattttgtaacatatcttctaagttaactaaacaacaattgtgcatatgttgagcaaaataatcagaatcatgaaaatgaataattccttcttcatgagccttcacaatatgttcaggtaacaataaacgtttcgtaatatctttacttacttctccagccatataatctctttgaacactattaacagttggattcttgttagaattttcttgtttcacttcttcgttatcacattcaattaaacttaagatttgttcatccgttgtattagctttacgcacaagtgctcttttataacgatatgtaatatactttctcgcaactgaaaaagcatttaatttcataatttcatcttctactaagttttgaatttcttcaacactcaatgcacgattcatcttttgacattgatactttacattattagtaatgttatcaatatcttcttcagataatctttctgtctcaacaacttctttgttggctttttcaatggcagcagtaatctttaattcatcaaactgtacttctgtcccattacgcttaataattttcatgtaccttttttcctcccttaacattaaaactaaaataataaaacttaatgaaataaacaactatctctcttaaggattgtgatttcattctaacacacggttattctattataaagcaatatgattcattggtcatgttttattttttaacatttggcaaacaaaacaaaaagcattgattaattcaacactttttgaattatattttttattgaatgttaattcttcatctcaaatgaactttcacttggtaaaacttccaattcctctacgtccattgattcaattctaataaaatgtccactctgcattgcttttaataagcgattaatgctttgctcatcaccttgaatacacgcctcaacatctccatcatataggtttttgacccatcctgtcaagttcaaacgtgttgcttcacgatacattgtaaaacgaaagccaacaccttggacacgtcctttaaaaatataatgttttcttaccatatcgcttcacatcctttgctcttattatagcacaaaaaaagagcaattgctcttttaatgtttcttcgcaaaattccaagtgtcacgacacatatcttctaaagtcttttgagcaacccatccaagttcctctttagcacgagttggatctgcataacaagttgcaatatcaccaggtcttctttctttgatttcatattttactttcacgccattgactttttcaaaagcatggacaatttctaaaacactatatccttgaccagttcctaaattacaaatatgcacacctggtttattatatttttcaatagctgccacatgtcctttagctaaatccacaacatgaatataatcacgaacaccagttccatcaggtgtatcataatcatcaccaaaaacgcctaaacatggtaactcaccagtagcaaccttcataatgtaaggcattaaattgtttggaattccttttggattttccccaattaatcctgattcgtgagctccaattggattgaagtaacgaagtaatgtgactgacatttgtggataagcatgttgtacatcagttaaaactctttccatcattgctttacttgttccatatggatttgttgtttctccaagtggacaatcttctgttaaaggtacaactttaggatcaccataaactgttgctgatgaactaaaaacaatgttattgacatgataatcacgcatcatcttcgtaacaactaatgttgtcattaaattgtttgtgtaatattcaattggttttgaaacagattcaccaactgctttaaaagcagcacaatgaataattgcatctaattcattgtctttaaaaacttcttcagtcttagcttcatctaagatgttaaattcataaaatttaacactcttacctgtaatttctttaatgtgatctaaaacttctggctgtgaattagaaaaatcatcaatcacaacaacatcgtgtccagcttgaataagttcaacacaaatatggcttccaatatagccagcaccaccagttactaatattttcattttcccgtcctccttaaataatcatcgaaaatattttgtataatctccttgcttgcaacaccttcatgtaatttttgattatcatcaaaaaaacaagggacatagtaataatcataagtatcagcaagcgtggcttgttgactttcctcaatcaactcaagagggatattcttatattcaggattttcttgatacaactgttcaatccacattctagcacgtcgacaatgtggacaattttctaaataaaagagcttcattataataatctcattgtcttaataacaactggtgttaatggacaatcttggaaattcgttggtgtatttgcaatttcatcaacgacttctaagccttcagttatttttccaaatgctgcatattcaccatctaaatgaggtgcatcttcatgcatgataaagaattgtgaacttgctgaatctttaatcattgtacgtgccattgataaaacacctcttgtgtgtaaaagttcattattaaatccattacttttaaattcaccttgaatagctggacactctttacctttcatagtcgcatccatacctccaccttgaatcataaatccaggaatcaccctatgaaaaattaaaccatcataaaaatgatcttgaattaatcctacaaaattttttactgttataggtgcaacttcaggataaagttcacctttcattatttttccatcttgcatttcaatttcaaatttaattgtttccattatttctcctctttctcctcaataatacgatctgcatcttcgataataattggtgcttcttttttcttcttgatatagaatcttacaccaaaaaacaagacaataacaccaattagccctaataatatataaacgattttctccatttgcttaaattgataagctaaagcaactgtcaaacataaatttaaaatcaataaagctccagttgttttaattcgatgattataaaggcaatctaatgctaaagcattcgatacaaataataaaataattaatcctacttccatattttgccctcctgtaaaaacatcatatcatttttttcaataaatttcactataattatgctgtaaccgttttcattaaaatcaagatgtgataaaatataagaaagaaatcttaaaaaggagcgtgatattatgagaacttatcactcaaacgaaatcggaaacgttgtcgtgttaggtcactctgggagtggcaaaaccagcgtcatagaagctatggcctatcgtgctggtatcacaaaaagaattggaacagttcaggatggaaatacgcttagcgattattcccctgaagaaattaagagacagacatcaattggtttatcagttattccattagaatggaatgaatgtaaaatcaatatattggacacacctggctcttttgattttattggtgaagtggaggcggctttaaaagttgccgaaagtgctttaattgttgttccagctactgaaggtattagtgttggaacaaaacaagccatgcataaagcccatgataaagcaaaaatgatttatattagtggtttagattatccaaatgcagcttataaacaaaagttagaagaactaaaaatgacatacggaaaagctattgcccctatccaagtccctatcatggaaggaaataaaatgcttggatatgtcaatgtagctaaaatggaaggacgttattttgaaggtgaacaaactcatccttgccctattcctgataatatgtgggatgaaattacccctattaaaaatatgattgatgaagctgttgccaatacaaatgatgatttattagaaaaatatattaatgaagaaccttttactaaggaagaaatttcttgggccttacgtcaaggagttatgaatcatactttaattcctgttttatgtggaacaaatcagattggtattcaaattgtcttaaattcaatggtagctttctttagtgcagctggagatatggtaaattctatggttgttaaaaatgaagaaactggtgaagatgatttgattggttttgatgaatcattaccaacatcattgtttatttttaaaacaattgctgatccatttgttggaagaatttctttatttaaagtttgtacaggcgctgttcatacaggtatgtctttatataatgtgaataaaaaagaagttgaaaaagtcaataagctttatatcatgaaaggaaaagaactgattgaaactgatactttaaatgcaggagatattggagctttatctaaattaacatatacacaaacaaatgatactttatgtactttagattatcgtgttgtttatgagccaattactttctctcatccttattttggtaaagcgattaaaccagttggtaaggctaatgaagaaaagattgcaaatgctttaacaaaattattagaagaagatccaacattaatctttgagaataatcctgaaacaaaacaacaatgtctctatggtattggtgatattcatattgaaactgttgttgctaagttgaaagaaagatttaaaattgatgttgctttagatgatattattattccttatcgtgaaacaattcgtggaagtgtaacacatcgttataaatataagaaacaatctggtgggcatggtcaatatggtgatgttgaaatcacttttgaaccacttaatgattatagtgttccttttgtttttgaagaaaaagtgtttggtggagcagttcctagagcttatttccctgctgttgaaaaaggcttagtcgaagcaacaaagacaggtgtattagctggatatccaacattaggaatcaaagctacattaatggatggatcttatcatagtgttgattcatcagaaatggcatttaaaactgcaactatcatgtgttttaaagaagcaattcctaaagctaaaccagtactattagaaccatttgtaacccttcatgtttatgttgatgaagaatatactggtgatatcatgggacattttaataagaaacgtgctcgtgttatgggtagtgatatcttagaggatggtatgttaaagattactgctgaagcacctcaagctgaagttatgaactatgcagttgatttaagatcaatgactcaaggtcaaggattctttgaaatggaatttttaggatatgaatttgcccctgagatagttactaatagaatcattgaagaacataaaaattaaaatcacttattttatagagtcaatttaagcaatcgcttcttgttgactctttttttacaagtattcaatttcaacatccaataacacagcctgattaattattttaagagataaatattctatgcttttacgtttttttctttatattttatttgactcttattaaaaagcgtttagaatagatggtagaagatgaattgtaaaggaggaaagaatattgtcacataaaagaatatgtatgtctcttttatctttatgtttaatcgcaacacttacttatcagcctattcatgctgaggattttgctggtcaagaaagtcactatattaagctttgttcttcatctaaattaacaagtaagcaacaaaaaacttgtaaacagtttaatacatacttaaatgataaaaataaaaaacttgctaaagaagctaaagatacaaaaaaagatgttcaagaaacaaaaaaatcaatcgatgacattgctcaagaaatatcaaagattgatacaaaaatacaatcagcgaaaagtgaactgaattatgttcaaaaaaatataactgctttacaaaagaaagttacaaatcaaaatcaacaattacaagaacgtctgtatacaatgcaaacaactatgaattctaatttatttgtaacgtatatctttggagctgaaagctttactgattttattagtcgtgttgttaattttaaagaaattacaagttacgaacatgatttagttaagcaactaaatgaaaatcttgatgaaatcaaaaaacaagaatcaacattaaaacaattaaagagttctttagaaaccgataaaactaaacaagcaagtttacaaaaaacattccaagctaaactacttgaacaaaacaaaacaattgcaagtaattcatctcaggtttctaaaaaccaagaatcaatggaaaagattcaagctaatttagctgctttacaaaaagccgctaatgaatcaaaggtttctaatgtaactcatgccacacctaataagaaacctagcaaaccatctaccaaacctgatacaaacaatcaacaaaaacctgatactacccctcaagaaaccccttctaacgacgatttaacgtcaaatgaagaactaggactaaagatagctaacaaagcattaagtcgcttaggctacatgtatgtgtggggtggaggtcactctatgagtagtattaccaatccaaactggacacaatttgattgttctggtcttgtcaattgggcacattatcaagcaggtgttgatttaggaagaattcattatacaggttcattgattaatgctggtaaaagtgtttctagaaataatttacaagcgggagatattattctctttagtagtaatggtacttctggtggtgttcatcatgttggtatttatattggaaataatcaaatggttcatgccccaacaaccggttcaccaatttcagttgctaatctaagctataactattggcaaaaagaatggtatacttgccgaagattatattaaaagaagtttcgatttgaaacttctttttttgttacttaatagcttctgcctgaatggcatcaaaagcatctaattgttgttgaacagtctttcctgccaataatccatcacataaatcatctagattagcccactgttcaaattttaaattataatcttgaagcaacattgtatttccttttgaaatcacatcctgtaaatcactcatttctttatccaatgtcacattaatattattatatgctggtaatttcccaaaagtttctaatgtctttttttgaacattttcattagaaaaataatcaacaaatttcttacattcttctacatgctgactcttagtaaaaactgacattctacgatcagatgcaatcaataatacatttcctttcttcatcggaatacccgtgaattcaaaagaaaaatcaattctatcaggagatatcatagatgaataagtaaaggcaaaacaactctttttttgattatagattttcactatatctttaggtttatattttaaagcttctttagcatccaaatatcctttatctatcaaagtctttaacatctcaaatcctggtcttgcaaactcactaattttcatttctccagaatttaattttttaatatattcctcactacgatcattaaaataaatttgtgataacccacctgcataaataatcaacttcataaacttttgtgttcctacaattggttgatatccttttttcttaagaacttcacaacaatgcaagaactcactccaattcgttggctttgttaatccacatgcctttaatatatccatatttacagccatacaatatgcaaccaatgcagctggtactgaataaattttaccattaactgttgaatcttttttcgcaatatcaattaatttatcagtaaatggaacatcacttaaatctacaagcttatcctgattaacaaaatcaaaaatattcttaacatccatacaagcaacatccgttgcttcattgttctttaaacgctcaccaatcaaatcagctaatgttttatttgtattttcaagttgttgatacccttcataagcaacatcaatagtcggattttcttcatgaaatgatttcataatttcctcaaaataatcaataacatctttctgcaatgaacctgttaaaaaattaatagaaatagcatcattgttttgtttcttttggacaatctctggtttagatgattgacatcctgcaatcaataaagaacaagccattaactttaataaatttttacctctcatctttcttccctcccttttctaaaacttcaataactgtctgtgttatacttgttaagctaataggttttgcaatatgtccattcattccaacatctaaacatctttgaacatcatcactaaaagcatttgcactcattgcaataattggtatacgtaaagcatcatctctttctaatagacgaattgcttgtgttgcctcatagccattcataattggcatctgaatatccattaaaataacctgatattcatctaattgagaacctttaaagatttcaaccgcttcttttccattacgagcacatacaacagtaacacctttcatttctaataattccttagcaatttccaaattcaattcattatcttcaactaataaaatcttttgattacttaaagacgaatcattataactttcttcatgagtttcattcttcaaagaaactaaggcatggtacaaccttgatttaaacaatggtttctcaataaaatcattaactccaacagcataagcttcttcttcaatttcactaaaatcataagcagaaataaagactattggaatctctctaccaattttttctctaatcatctgggttaaatgaacaccatcaatatctggtaatttccaatcaataataacaacatcataatcattttgttgtttaaaaccatcctcaatctgatgaaaagcttctaagcctgttaaagcagtatcaacatgaatcataaattcttctaaaatagcaccaacatcctgtaaaaccataggatcatcatcaaccaagaaaactcgcatatctttaagcttatccttgtctttataatcatcctgttcgccctctttaaaagataactgaatacgaaccatcgttcctttctttaactgactcttaatatccattgttccacccataatcgaaacaatattcttcacaatagacaaacctaatcccgttccattttcttgaccatagaattgatttttttcttgttcaaaaggctgtccaatacggtctaaaaactcttgactcatcccaattccattatccttaattaaaaactcaaaattaacaagttttttattaacagattttatttcatgaataaccaattgaatacgaccacctactggtgtatatttcactgcattattcaataaattaataagtatctgtttaagcttcatcatatctccataaagaatatcatgaacaacttcttcacttaaaatctgtaattgttgatttttagacttagcttgcatatcaataattccaaaaacatcactaatacaatctgataaaacaaacttttcctcatacaatgccatcttgccactttcaatctttgataaatctaagatatcattaattaaacttaacaaatgtgaagatgactgtgatatttttttcaaataatcttttaatctttctggattatccaaatagtggctagcaatttcactcattcccataattgcattcattggtgttctaatttcatgactcatctttgataagaaatcagattttgcttgatttgcttgttttgcatccaaagcagccatctttaatgattcttgaatcaaaacatcattcgtaatattcgcaataaagaatatatatttttctttacccaccacattaatattcttaataatcaaacgaagatattgtttttcttgtgttaatggatgcaccctttgtgcttcatatgtacacgtttgatcaatttcattatttttaatttgctcagacaaccctacaaaaaagctatctaataaatgcatgaaaatatcttcattttctaccaaagtttcattttctaatccaagtatatcttcactattacaaaatgctctttctaatttttgacttgtcttatcatacaaacaaataaacaaatcacttgcctctgccgtcgcatcataaatggcattttctaactgtgtcttttcataacgacgtttttcttttttcatattttgatatatctcatataataccaatgcaattactaaagctaaacttagaatcatcaaaacaaaagctacaaacaacatccctaatactaaatttgattcttgttgaatagcacttacaggaatcacaccacataaataccagtcacaatcttcttgaacagaacgtaatgataaataaacagtttctccttggactgatcctttcacaacaactgattcattactttcaatagaattataaatattttctttaatttctttttcattaaatccaacttcttttaataattcatcagcatcttgcatataattccaaatcacatttggggttttagaagtcaaaacaatcttcttagaacctgaatcgattaaacaagcaaaaccagttttattataaaacgttaaatctgttccttgagaatatttagaaaaaggaatttctacatataacataccaccattttctacaggcatttgtaaaaccgtttcccaaaccccataagctccattaatcgctggtgaaaaagtggaatctttattcttaaaatcttgataaggtaaatcagcatgtgttaccttatttccatgactgtcaattccttcattatttaagaaataaatagcatttaaataaccataatgttcaactaaaacatttaattgttgttgaatttgttgagtatttaaattcttaaaatttgaactatatttttttacaaaagcttcatcctgatcattataattagctatctgatgcgctatattatccaatagattttgggttaaatcaatagcactactatccattttctctctaatattaataatcgtaaaacctaacattccaataataaaaataaaagtaatactaatggcgataattattttcttattctttttcatctttacttcctatattctgataatagttttgataaagatcataagcaacttgattaaaatatttcaataataatggattaaatacgccacattctccatcattaatcattttcatagcttcttcatattggaaagcaggtttataaatacggatactaatcaaagcatcataaacatcagcaatcgaaacaatctgtgcccaaattgaaatttcatcacctttaagcccatcaggatatccatttccatcataacgctcatgatgatgtcgacagatatcataacaatattcataaagatcactcttttttaattgttcaatattttctaataattcacatcctcgaatcgtgtgggttttcataatttcaaattcttcctttgttaaacgtcctggtttattaagaatttgatctgaaatagcaatttttccgacatcatgcataactgctgcatcaccaattaattcaatttgtctaggcgtaaattgatattcattgtttctcacaagttcatttaataaggctcgcgtaatcttacgaatacgattaacatgatcaccggattcacaatctctaaattcaattgcggtggatagagtatcaatgatggaacgtgttgcatcataaagttcacgttcttggtattgaatacgttgaatctgttgattaacaatttgttgtaaagaatatctatgtttatatagttctataatattttctatacgacgtttaataaaagaaatcgcaaatggttttgtaatgacatcaacggcccctaaatcaaaacctttttgtaaatagcttggatctgtttctgaagtaattaaaaagacaggtatgtatttcatcaattgacgtttattcatttccttcatcacttcaaaaccatccatttctggcattacaatatccaataaaacagctaacaacctatctttatatgtttcaataatttctatagcttccacgccattagacgcttctttaatttcatatttatcttcaaaagagttacaaagaatatcacgatttaattctatatcatcaacaactaaaatgatattcttattcattgtgatccctcatcaaaaattgtctttagaccattataaataaaatcatattctttgagacattgttgataaaattcatctgttgtagcatgattttctttacgtaaatcatcaacccaattctttgtgatacaaaataaagatttcattgctaaattaccagaaactcctttaagcgtgtgaacagattttaataataaatcgtaatcctggtttaaataagcttgtttaattgtatttattgtttcatcatttaaaaatttttttaatagttttaaagccaactgttcatgattggctaatctcgacaataaatcatcataatctattcctatttttaacatttcctctcgcatgtttatcccaccttttattcacctcctattataaactatttttaaataattcatagttttacttgtcataaaataaaaacttgtgatattttcatgattcgttataataaagttaaggaggatttatgaaattattatttaaacaaagactattttcatggtttgatagctatgatatttatgatgaaaacaatcagccaatttatcatgtacaaggaaaattaagttggggacattgtttacagatttatgatcaaacacaaaatcacattggtacaattaaggaagaagtgcttacttttctacctaaatttaatatgtatttaggggaataatatattggtaaaatctataaagaattttctttttttaaacctatctttcatcttgattgtaatgactggaaaattcaaggggattggttggaatgggattatcaaatcgttacatctcaaggtcaacttattgcaactgtatctaaagaagttttccatttaacggatacttatgttttagatattattcttcctcaaaacgctatttatgttttaatgattgttttagctattgatgcagaaaaatgctcaagacaaaactaaaggacaagatttttcttgtccttttgcttatttatgataagtttcatgcttgataatcttaaatgcacgataaacttgttcaactaaaattaaacgcattaattgatgaggaaatgtcattttagaaaaactaatacgttgattagcacgagttagtacttcttccccatgtcctaatgaacctccaataacaaaatcaatggtgctcttgccattaatcatacaattctctattttctcagcaaattgaatagaatcaacagcttgtccactcacatctaataaaatcatataatcatcttgtttgactttatctaagattcttcttccttctttagctttcaccatcatttcttgagctaatgatgctttttctggaatacgttcatcagcaacttcaatgacttctacatctccatatgctgataatctctttaaatactcattgattccatcttctaaatacttttctttcaattttccaacacaaataattttaatcttcatattttcctcctgatatgacatcaacttgactcgcgactttaatttgatcaaattgaatattttgttccttgaaaacttgtttgtatgtttctattgctttttctttagtattggcttcttgagataaatgtgcaagaataatctcttttgtattctcacctatcatttcactcatcagctgagcactatactcgttgttaagatgtccaacatcattaagaattctattctttaaaaacattggtcgttttgttgccattaacatttcaatatcatgattactttcaataatataataatctaagtttttcatatattgacgatttttttgtgaaacataacctgtatcagtcatatataataattgttcatctgttgaaataacaaaaccaattggatcacttgcatcatgacttgttttaagtgttaagacatcaaaaacaccaaattggcgatgagtataaggaattaatgtatgatattcatctaaattctcaatattctttttagcactgaagattttatcagtatcaaaaatatgaatatttttattatgatcatagtgatcatgagttaaaaatacataagtaatatcagaatcattaaaacctaattgttctaatttgtataaaagctgttttcttgtgattccacaatcaattaaaataccacagccatcttcatatacaaatgttgcattgccttttgatccacttgctaaaacatgaaattccataattcgactcctttatgactctattatacaaatttaaaagatgaaaaacaacataatttaattttgaaaaacatatcatcatcttttcaaatatgttagaataagattgtaaaggaggggttatattatgcctagaattattacaattgccagagaatatggttcaggcgggagaatcattgcccaaaaagttgctgaaaagctcggtattatttattatgataatgaaattatcgatcttgcagcaaaagaactaggaattgatgttgatacaattcgtaaagcatcagaagaaaaaacatctagtttcatgtataccatgtcatcatctgcatttacacttcctttaaatgatcaagtgtttgcgatgcaatcaaaaattattcgtcatatagctaaacatgatacatgtattattgttaatgggtgtgctgattatattttagaagattatgatgatgttttaacagtttttattcatgcgccgtttgattcgagagttaaacgtgtaaaagaagactatcaagaagaacatgatgattatgaaaaatttgtagcaagaaaagataaagcaagaagtcattattataactactatacaactaaaaaatggggtcaacttacaaattttgatttaacaataaacagtgatgtaggacttgatgaagtcgctgatatcattgttcaattgtatcaattgaaagagaagtaatggaagaaaataaaatgggcgttatgcccgtcaacaaactattaatctctatgtccttaccaatgattatctcaatgcttgtacaagccatgtacaacattgtagatagtatcttcgttgctcaaatcagcgaaaatgctttaactgctgtctcattagctttccctttgcaaaatctgatgattgcttttgcagggggaacagctgttggggtgaatgcattattatcacgtagtttaggtgaaaagaatcaacaccatgttaatcaaactgcagtcaattcgatttttattttcttaataactgcacttatattcatggttggtggtttaacactatcaaatgtattctttaatgttcaaactaataatgctgaaattgttacagcgggaacacaatactctatgattgttgtaggaggttcaattggtttattctgccaatttttatttgaaagactcttacaagcaaccgggagaacattacatacaatggttacacaaggactaggagccattattaatattattttagaccctatttttatttttggcttatttggtatgccaaaaatgggtgttgcaggagcagctcttgcaaccattacaggtcaaattattgcctgtctacttgctataattttcaatcttaaatttaatcatgatattcattttaattttaaaggctttaaacctaattttcaaatcattaaacaaatctattctgtggggatcccatcaattattatgcaatctattggaagtatcatgacatttggaatgaatactatcttaattactttctcaacaacagcgactgctgtttttggtgtttactttaaacttcaaagttttgttttcatgccagtgtttggattaaacaatggaatgattccaattattgcttataatttaggagctaaacaaaaagaaagaatgtttgatacaattaaactcgcaatgatttatgcgactggaatgatggttataggggttattgcttttgaaagtattcctcaagtcttattaagtttctttaatgcttctgaagcaatgattaaaattggaacacccgctttaagaatcattgcgattcactttttgatggctggttattcaattgtttgtagtgctgttttccaagcagttggaaaagggacatacagtttattgacatcattaattcgtcaattatttgtcttattaccttgtgcttatcttttatcattacttggcaatatagaccttatctggttatgtttcccaattgctgaattagcttctgcaacaacatcaacaatcttatttcaaaaaatcaaaaaacatattaacgcaatataaaaggtcaaactcaacgtttgacctttttctttataacatttgatatccgtaagaattaacaactgcatccaatggaatacctgcttcacaatcttcacaatgatgtggatcagataatttaaagttaggtaaatcttcatgtgtaaataccccatatactggatattcatcaactctatccacattcgcaaagataactgataatccagtaacttttcctccatgtgcaagaattgtacctattgctttagaaattgtatgaccactcatagctgttgctaaaacaactaaaacattctttcctttaatcattggttgaatattgtttctaacaaccatttgaccagtgttatcaaattcaggtgtaataacatagaatgatttatgtttgttatttgaagggaatccaccagcagttaattcttctgctaaataagccccaataacctcacatccatccatacaaataattgtatcaacaggtgtacgatttgctcctgtttcaataagattttcaaaattatagcctttaagatgcgcattaatttttacttttctaacatatttttcagccattaccttagctaccaattttgcttcagattgtctcatttttaatgatgacatatcaatatagtaattaacatggaaacggtcacttgaaaaatgtccaggtgttacttttaataccaatttatcattttccttagaaggaattctgatttgttctttcatattctactcctttctttatgtgagagaaatgttaacaagtgatttcaatacctgtttcatatttcttatcatcaacaatgacacgtactttataagttccacttaatccagctttattgactgaacatgtaacttttcttgcatctttttcaataaatgtaccacaacataatgcagcaaatggtgtttttgcagttgaaatgaagtaaccatgttgttcttcaccttgttctaacatcaacataaccaattgtcctgattcaaatgttgctttgaaattgaaacgatcatcttcttcttcaatagaagcttcatagatatgagaaagttcttcaccacaacaatccataggaattaatgtatcagattcttttgttactcccatatgtcctaagcgttttccttcacctaatggtaaattatcttgattatgatacaagcttaatttttcagcacgatagaaattacctttgacttctaattctaacatcacttcatcatctaaaacttcaaccgtaatagaacgtgttctaaccattggatcatcttgcattaaagctgcgaattgttcagatgcatcatcaccataatattgaataccaccagagtgaaccatataatgtccttctttataatattcaacattacaaatatattgagaatagaattcttgtcctctttctttaccatattgccatacttgtttaatagtcatatcatcagtattgattttataacgaactcctcttgagaagttatctttatttaaaatacgtttttcaggatttttagaacggaaatgtccgttatcaaaacacataacatcaccattaggtgtaattaagttagcatgttgttcatattgccaatcaaaatcatcaccaactggtttaaagaaatatggtgtatattcttcaggccacatttcagggtcaccaatgatccaattgagtttaccagtatcgaaatcaatattacacatactatcaatatgacgaccagagaaagtcagagaatttgtattttcgtcataccaaacagcattgttatggaaccagtcttcttcagtccagctaccacttcttgcaactttagctggatctaagaaatctttataatcccatgtttttatgatttcaccagtgttacgatcaaccatcacgcacatgtcttcaacagtttcacttgttaaatcttctgttaagataagtaggtttccattttctaattcgaattggtcatgatggtaaccccctggaattgtgaattctttaataactttacctaccattgtcatttcataaattcctgacatatagtaaggaagtctcaataaacgatgtgtaccaattaaaatattcccatttcttgcacgtttaatatcaaatactgtaggaatatttaaatgccatctaacatcaccagcaaagtcaaaacctgttgctaaatcagttaaggctggtgaaacaataattaactcatctcttaaataatgataagttgtattcatatgaactaattcaggaacatcattagataaaggttcagtttgaatcttaactgtatttttagctccacgatataattcaatttcaacagtgttttcatatccaccatacaaacctaaaacaggtaaaatatgagttgttgctttagggaaagtatgttccattgttgcttcaggagtttttcctaaaactctaactgttactgctacttctttttctgttttaaataagataactgcagctaatggattaataaagtaaggatttaattttactaatggattttccaatgtataatttccattttctaattcatctaacattgctttttcagcttcagtttgacgatcaaccaagctttttgtgaaagtatattcaatagccattttgtacctcttttcctagcattcgatttgaatgcctgtttcatattttttatcattaataataactcttacatcataagttccttttaaaccagatttattaacaccagttcttgtattacgatcatctgtatctaagaatgaaccacagcacatagctgttgctggttttgcagttgtaggaatatagtaacgatgaacttcatcaccttgttctaataacatcattgctaaatcacccttcatgaaacgacagaagaatgtaaatttatccatttcatcttcaattcgagcattgcaatcttctggtaacatttccccacatgcttcagctggaatttctgtatcaaattcttttgtaacacccatagaacctaagatttttccttcacctaattctaagtttgttccttcaacatataatttcattttttcagcacgatagaaattactatttgtctttaattcgtacatttttgtattattcacaacttcaacagtaatggcttgttgatatccacctgtttgaattgcaaatggtcctaatgcttcagaaggaataccatctttatcataagcaataccaccagagtgaactaaataatgaccttcattataatattcaacattacaaatatatggtgagaagaattcagctccacgatccttaccatattgccatacttgttcaattgtcatatcttttgtattaattttataacgaactcctcttgagaagttattataagcaggtactttcttttcttctacctttgttgagttatgatggttatcaaaacacataacatcaccattaggagtaattaagttagcatgttgttcatattgccattcaaaattatttccaactggtttaaagaaatacttttgcatatgttctggccaagtttcaggatcaccaataatccagtttaactctccactatcaaagtcaatattaaccattgaatcaatatgacgaccagagaaagttaaagaatttgtattagcatcataccaaacagcattgttatggaaccaatcctcatcagtataagataaaccttttccttcaccaggagtcaagaatttcttataatcccaagtctttaagatttcaccagtattacgatctaataagatacacatatcttcaactgtatcacttgttaaatcttcagttaaacataataaatttccatcaggcatttcaaattgatcatgatgatatccacctggaacacggaattctttataaatctttccaactggactcatttcatataacccagacatatagtaaggtaatttaattaaacggtcagttccaattaataaatttccatttcttaaacgtttaacatcaaatacacataatgctgttaaatgccaacgaatatctccagcaaagtcaactccaatagatttttcactaccagctggtgtcaaaaacataatattatcttcaaaatattctggtgttgtttgaatatattcaacaacactatgatcacatacatcaccaatttcaatatgaactgttgttgtatttccacgatatggagtgatttctacagtattattataattagcatataaacctaaaactggtaaaacatgtgtttttgctttaggaaaagtgtgcacaatgtcagcagcctttgtttttcctcttactctaattgttacagcagtttcttcttctgttttaaaacatacaactgcagataatggattaattaaatacacatttgttttaactaatggattttcaacagtataatttccactttcaaattcagctaacattttttcttcagattctttttgtaatggaatccaatgttctatttttttatattcaacactcatttttcttcctccttttatttatataaataattgcgcaaaatgcgcaattatcttataagttttcttcaatcattttaataatagcaggtttttgttgtaatccttgcatacgttttacttcttgaccatcttttaataaaattaaagttggataacctttaacttcatattgatcaactaattctttatttttatcaaaatctaattttaaaatagttactttgtcccctaatgctttttctacatcatttaatacaaaagctaacattttacatggtccacaagttgttgagaaaaaatcaaccaacactaaaccattccctactaattcattaaattctgtactctctacttcttttaacatgatagatcctccttttattttgtatatcttgaaacttcttgagccgcaatagctccatcagcacaagcagtaataacttgtcttaaattctttgtaatacaatccccagcaccatagatacctggaatctttgtttccattttttcattaacttcaatataaccatattgatttaaaacacctaaatcttttaagaaatcagtcactggtgataatccaatatattcaaagactccatcacaattgactgtgttttcttcaccagtttttgttgatttaaaatgtactccggtaagtgaactatcaccaacaaattctaagatatcttgatatggataaactgtaacattatcaagtgctcttaacttatcacaagcaattggatcagcagttaaatcaaacatcgttacaattgttaatgatttaacaattccagctaaataaattgattcttcaacagcagagttgcctccaccaataacaacaacatccttatcacgataagacgcaccatcacaaattgcacagaaactaattccattaccaatgaatttatcttcattaggaatattcaatcttctaggtgttgttcctgtagctaaaatgattgctttagcagtaatcactttatctgcatcttcttcaatatagattttctttgtgtctccattatcttcaattttattaactgttccataatcgaaggcaacatttaactcttgtgtatggttaaacatctgcattgcaagttcagccccattgattgttcccatacctgtatagttttgaatttcatttgtattaataatttgtccccctggagcaagcttatctaacattaagacctttaaatcagcacgtgctccatagatagcagctgtcatcccagcaggaccagcaccaataatcactaaatcataatatgtatccatatacatacctcctttactatcattttactccttatgagcataattagtaatagatatttttaagttttttatctttttttatatctaatatttagccactaaactaatagattaataaatggaatacccacaataataataacaataaattcaatcacaacaaagacagttgaatatttataaacatcaccagaagttaaatattctttgttaccaaacatcattgctgcaaatggtgaagccgctggtgtacaagccgcagttaataaaactgtaaagattaacaatgtgataattggggcaggattaacgcctgtattaacacaataagttaaaacaactggttgtaaaatcataccaataacaagtgaattgcaaatatttgttaaaacaattgcaaataacaataagacaattgtaaacataccacctgaaataccagcaaagactggtgataaaacagtatttaagaaagctgtaatacctgttgcttcatttgttaaaacacttccaagtaagattgctgaagtacaaagtaaataagttggccaagcaaagtctttccccataacttcatttaactttaagactggtccatcttcaaagcttaataataccaaaatagttactaacaccattggcataatcaatgaattagcatttaagaagtttaaaattggtaaatttggtaataagcttggtactaacatcacaaagatgaaaatgcataagaaaataccatatgttttttgagacattgtcattggtggcaatggattcttttctaacatttcaatactaattttctttaaaggttctacatcaggtctaaagataaatttcataattaatacagttactgcaattaataataacccaataacaaaacatccaataaagtatgatgcattagaaatcatcacaccatccatagaagccaaagctgggaagtttgctaataacccacgatagtttccaagtaaagctaatccattagccatatatggtggaacagggaaaccaattaaagccgcaataacaattccaacaatcataactttaggatatgcatctgttttcttgaatcctacttcatcaaaaataccataaagaactggccagaataagaagattggagcgaaagcaccaatgaaaactgacataacatatgttccaagtaacataaccaaagtaaatatccaaggtcttccttcaatcatttttcttgtcataatccaacgtgcaatataaaccgttaaacgtctatttgttaaaccacccatgaaaatcattaagaagaacatttgtacaactgttggattcccaaaagctgacatcataatatttcctgcaggtgcaaaatcagtaaacgccaacataacaatacttgttaaactcgctactgaaggatcaattgtagaccacaaataaatagttccaataaatacccccataacttgtaatccgatttttgtaacatttggcaagacacccattggaacgaatctaaatccaagcatgataatcattcctatgataaaatggatgtacgagctgttgattttctttttcataaatcttacctctcctattttattatccgtattcttgttaatattttctcataccgacacttctattatacaaaatatgtaagcgcttgttaatggcaataacttagatttacaattcaacaaaaacaaagaaaaagaaacaaaaaaaggtgggattacccacctaatgcatctaaagcaatttgtatatttaacgctcctaagcgttgttccaactcctctttcaacttaaaagctggctttaaatcagataatttttcaatacagaaacaaattttccacttctttatttcattgattccatattgaagaatttgtaaacgaattgcatcatataaaagttgtttttgattactatcttttaaataacgaaaaggaaaaacaagcttaaaatgtgcattagacaattttatttgctcaaccagtacatctaaaaatttataaacctgataatcttcatcaatatcttcacccatatctaaataaggatttaagacaatatcaacattttccatatcaattctatttgccttagcaacaactaaatatttatataacttataaatagtattatcacgatgtttatcaacacgatattttttaatgaaagcctgtaagattttttgattatcaataatctgataattatctgatgtctctttcattctttctttccacttcataggagattcagcaaaatacttattaaacaaagcataaaaagatttcatattcaaaattccaacagcattggctatttcactcattgataattcatcatctaataaataatccataattctaatcaattttcgataagaagcaaaagatttaaatccttctccattaattttcttcataaattgagaaaaatatgccggattcatataaaaacgttttaaaatatcatcgaccccaatcttttgattcatattcaccataatatattccacaatactataataacgttgttgaagatctaaagttaaatattcttcctgcgtcttagtatgtgaaatcaactgatatgacgtaaacaacatatgcattaaattatgttcatcaaatcttctttcttcactatcttcttcatgataaagctttatcaataaatcaacaacaatagcattcaatctttccttaagcggtctttctaacggtcttaattcatcattattcaaaaattcaacatattcaatcttatcaaaaatatccttaaactcagataactttattttaactgataaaatatacgctccttggctttcaatacgatgtgcaataaaacgattaataaaagtcaattcattttcatgaattgtcacactgcgttgaattttatggattgttatacttccttttaagactaaaataatctctaattcttcttcatgataatgagctttttgtgaataaatctgcatcatttctgctattattcttttcatttataaaccaccctatttctgtagtcattatctcatatgttgcactatttttaaagaataaaatccaaaaagaaaagagcatttctgctctttcgtctttttatttaagtccgtattttttgttgaatttatctacacgaccatctgcactagcaaatctttgttttccagtatagaatggatggcaatttgaacaagtatcaacacgaatttcgtctaatactgatccagtttcaaattcagctccacaagaagtacaaatgacttttacctttttataatctggatgaattccttttttcatttttcttttctccttccgccttgaaatatttgctacttcaaagtaagttgctcaattataatatcatttctttaccataaatacaatactttttttatttttatttaatcttctatttcataacgagtaatgtgtgcacctaaagtaattaatttgttatcaatattatcataaccacgatcaatatgataaacatttgtaatttctgtcttaccacttgctattaatccagcaacaactaaagctgctccacatcttaaatcagttgcttcaacacgtgctccatgcaatggggttgctccagaaattatactagaagcctctcctacctcaatatttgctcccatcttattaagctgtccacaatgtttaaaacgttcaacatagattgtctctttaacatgagaaactccctgtgcttgagtcaataacgttgtaagtggttgttgtaaatcagtcgcaaaccctggataaatttgagtcttgatatcaactggttttaaaccttctttcgctccataaaccacaatactatcaccaacaacatccattttaacacccatttccttaagctttgaaattaaggcttctaaatgttgaggaatgatattttgaataatcactctttcgccagccgctgcggcaataattaagaatgttcctgcttcaatacgatctggaataatttcatggaaagttccacctaaataatcaactccttcaatcgtaattgtatcagttccaacccctctaatctttgctcccatctttgttaaaagattggccacatcaataatttcaggttcttttgctgcattctcaataattgtttttccttttgctcttacagctgccaacataatattaatagttgccccaacagaagcaaaatctaaataaatagaagttcctacaagttcctcagcctctaataaatacgtatcattttcataagtaatttttgctcctaatgcttcaaatccttttaaatgaagatcaattggacgagggcctaaataacaccctcctggcattttaatctttactcttttatatttaccaagcaatgcccccataaaataataggaagctcttaatttattaactgcatcactcacaagtggaatatcttccatatgtgtaggatcaattctaatccgttctccatctacctctaccttacatttcaattcttccaataaaattgctaatgcttcaacatcagaaatttctggaacacctaatatttcaacgggaccatcagataaaacagcagctggtattaatgcgactgttgcatttttagccccactaattcttactgttccatttaatttatagccaccttcaattgcaattacttctgccatcagtttctttcctttctcaatattaatatataaaaatgtatcaaaaatatacactgtcatttcatttcataatgattatacacgggaatcttataaatatcaaaagaatttcaaaaaacttcttcatgtctttcattattcttttaaagataacataaatcatccgatatattcattatttttacatctttattatatcaatataactcaccagcagcaagtcacttcaatcctgatacatttgttgatgtgcgataaagaagtaatagaagtgtaaaaaattttgccgttcctatccggcgtttcgcgattacgtcggataggtcgggcggttattccggcaagtcaatcttgccgacaaagctgtaataaatctctatgtcctgtctgcgggtgccgttcttccaaaaatgggcgcaaaaaaaagcagcaaatcttttcagacttactgcttgtgtgccgctgtggtgggcgatgggtatttaatttttcaatgggagattaaagtgaaaactggaatttacatcttcccaaaaatctctcaaagttatttcatatcagttgaatacaaatatatttgaatcttcgacatgttcaagaaattttcttgccgccagagacagtgtttttctgtctttccaacagattgcaacattacgcttcggtctttcttttatcggacgtataattaaaccgtcatcaaagcctctcaggatgcgctcatatagcatagacacccccaagtcctgacgaaccatttccataactgcatagtcgtcataaactgtcagtttcaaattccgaggttgcacacctgcatctttgaatgccgccagtggatatgaataccccaactcatccataaggataaaaggttccttagcaaggtctttcacagaaacaatatctttttctgccaaaggatgattagatggcaataccgcaagcaattcatcctcatacaaaatatcatattccaaatcctctgcggtatctgtactgataaatcccaaatcagcttctcttgctctgactgccgctgcatttacctcatatccaccctgtagcagtttgaactctacagaagggtatttctcttgaaaagttttcatcaagatgggtagatataacctgcttacactcgaccaagctgcaatggatacaacactactttcaagaccttcgatttcttttttcttcccggaaaggtttttttccgccgcataaatggcttgaataaagggatagagattttcgccatctgacgtcaattccagacggtttttctgtcgcaggagcaatgttacccctaattcctcctcaagagataaaactttttggctaactgaactttgcgtatatcctaattcctccgccgctaaactgaaactgcctaattcaacaacacgacaaaacaccgtgtattttgatgtttggatcattgttgcaaccgccctccttgtatcgtgttttctaatacacacattatatctattaattttacaaatagcaagggcacagctataataaaagaaaaacaaacaaggagtctaacgatgaataaacaaaaagcaacatttttagcgttcactgtaccgcttgcatggggtacttcctatatttttatggcttatctaatggatgggattccgccggttaccattgttgccctccgcacaggaatcgcctttctggtcatgtttgctctctttttccgcagagtgtgtcgcccggatcgtcaaaccttaaaagcaagtgcaatatgcggaggattactggcaacggttttcctgtgtcttttgttgggtgtacaatatacatctgcctcagaaacaggttttctgcaaagcacgacagtcattattgtgcctattatcatggccgttctccgcaagcgtatgccggaaactaaaatcgtgattggtgttattgctgttacagctggtctcctcctgctcagtggcggtgttggacagttttctatcggaagcggtatcatgctgttttctgcttttatgtatgctgttcatattgtggtcagcaaatcctttgtggaacgagtagacagcatttccttgggcatctggcaaatgctttttgcttgtatctatgccaccatagcagccttcatttttgaaacgccagttcttcctcaaacgggaatccagtgggcgagtttacttggtttaaccttgatttgctctgcttacggttttgtcatgcaggcttatgtgcagaaatttgtcagcgctgaaacaacgggatttatgttttctttagaacctgtctttactgcggtatttgcatttgcttttctggatgagcgactgaatctgatgggctacattggtgcattactgattctactcggtgtcatatgtgcaaatatttgttataaacctcagaaataacgaaatgggtattatatataaggacaatctttgacagcaaatccatatactaatgcccattttctctttgtaaacccgcaatttgtctttttgttagcactaaatatcatttatttcagctaaaaaatttaacttactgttaaaaacggaatagtgggacggtctgttcttgacttatttatctctgcttctttatgtaacattagcatttcattaggtaatataatactactaaagctaccatacataatttgtttttcaaactctgtttcataataagttttttccccaataacaactttactcttgattgtaacgacttctttattttccaatcttctctttaatggaatatatgatgctttatttaatggtatattggtattggctaattgttcattccctgaaatgacttgtacataaagctttcctggcaattctcctttcgctttttccatttctgaagaattattttcctgtggataataacgtaatctttttactcctatatgattatcatcaagattttcaaagcgtaaataaatcttatattgcaaaacttgatttaatagtttttgattgctttcaatatattcaactcttttttcttgattttcttcttcaatagttatcttggtttctaaataattcaatagtggaattgttccttgataaacatatttttcattttgaaatatcattggataaatataattctgatgattttcatcaacaaaaaccaattcaactttttgattatgataaacttttaatgcacattgataatcaaccgtcacatttaaattttccaaatcataacttttcgtttcaaaagatgaatgcgataaatctatataacgttcctcctcgcttgatgaattattaactacatattcatgaactgttgttttacttgaaactgtacggggctttattaaatttaaaaagtataaagagctaaccaaaaccatacaagcaacacatactccaataataatataatcacgggtttttcttctttgattctctttctgtaaattatctaatacaatcttagtttgatcatatatttgctcaattgaatgattatgattatcttcctctattcctaataattctgtaatagaaatttgaaaaaaatcactaatatctaacattgttttcatatctggtaaacttagatctgattcccatttagaaatcgtttgtcttgatacatgtaactgattagcgagttcttcttgtgacatgcctttttgttgacgtaatgataagagccttttcccaatactcataagtcttccctcctcagttttattttacatcttttaaaaaaaatgactatcaattttagttaacattttgctattaagtttaacaatttctattttttatataaaaattcaaaaaacactctttacacttttgcaaggagtgttatacttatatatacaacatggtccgttggtgaagtggtcaacacactaggttctcatcctagcattcacgggttcgaaccccgtacggactaccaatatgtcaaaatgccttataaaataaggctttttttatttgttgagaagattttgagaagattattctcaataatactaaatgaaagtatataaaagcctatactaccatatgaaaacactaggtaatatggacttctaaatatgagttctttgatacgctcccttattaggtgtcaaactacacttttgtagcttctataaaatataaaagccaagacatatattaattatatatatctagctttctttacgtcattgttaacttaatgacattggacaaaaatggtcttttaatgtccaccaaatactttaaattccatggaagataatttagtatccagtttatttatttcttctttagttaattcaatattaccggcatcaaagttagattgaattctttcaatcttacgagatcctggaataggaataataaaatcatatttacaaatcatccaagcaagagatatttgagctggagtagcgttgtgcttatcagcaatttcatttactacttctaataattcatttgtttttctaataccttcatcactatattgaggcatattaactctaaaatcagaaccatcatttttaaactctttattagatttataaacaccagttaaagccccattagccattggcgaaaatgccacataagtaactcctaattctttacaagtatcaaaaatagattcatgccatctagccatcatcgaatatctattttcaatacatgttacaggacatactgcatgagctcttcttaagtattcctcagttgtttcagatataccccatgcttttatttttccttcttcaattagttctttcataacactagccactacttctggttctacattagggtcgatacgatgttgataatatatatctatataatctgtttgtagtttttttagtgatccttcaatcgattctctgatctttttaggagaactatcaaattctaagtgatctcctttatgagtaactccaaatttagtacataaaataactttgtctctaaatggtttaattgcttcaccaacaagttcctcattataattaatacttccatcactatttacacctgtataacactcagcagtgtcataaaagttatagcctattttataagcttcacgtaatgcttgtatagcttcttctttaggtgttggtgccccactagcatgagaaaatcccatacatccaaaccccacacgatttacatacatatttgtttttcctagtcttatttgtttcatttttttctcctattcaaagtcacatttatttgagacttctctccatttctctaattcatttatttttccttgtaatgtatcaatgactgcatctactgcagctgcacctaatgtaaggatttctggtaaatcatcaccatttactacgtcgacaataacttcaccagctttatcaggatctcctgcttgttgatgtttattttcaaaattaccaggtctagatttacctactgttgtttcataatcagagattctcacctttgtgccttgtaaagattcactgtcatagaatcttgttctaaaagcacctggttgtacaaccattgctttaatacctaaaggagcaacttctttcattaaaccatttgttaataattcaaatgcagcttttgaagaagcataatatcccgaacctactgcggatcttgcagcagcaatagatgtaacatttaaaatatatcctgatttttgttctctcatcttaggtaaaactgcttttattaattctactgggccaaagacatttgtttggaaaagcttttgaacttcttctacttctccttcttcaattgctgaacggtaaccatatccagcattatttactaatacatcaattgttccaaatttttcgtttgcagctttcactgcttctttaatactatttttatcacaaacatctaatgaaactgctaacacattatctggataatcttttactaaatcatctaatttaccagcatttcttgcagtaactactgcattgtcaccactctttaatactgcttttgcaatacctgcaccaataccactactacatcctgtaattaaccaagttttcattttcgctttccttctttcttttattttacaatcttattgtagtttctttattcataaatgtacaataccataattgtattcatctataactttcatgcatactaattagtaatcattcctttataattcataccatataaactagcaaatcttttcattgtatattcaccagctgctagttgttcaatagttggtgcatatccctgaaatacaaaatacatatctttaccttttaataatgattcatctacattattataaaaacgatcaataagattacgaatcattccagacatgctatgccagtaaagaggagaaccaataattatttcatctgcttcactcattttctttacgacttcttcaaactgatcatcgttaaacttttgaccataatcataaatcttataatctactagatttatagtttcatagtttttgtttattaaaaattgttttgttagttttactgtgtttccgtctttatttggacttccgttgataaataatgttttcataatcttcctcttttcattatgacataaattctttaataaaagcatatatgtcatttatatcttcgttgtatattttataaattatttgattggatgtttgaatgtttgttatgactttgaatttattcaatatatcgttatgactcataggattattaatagagcctggagcatcttttaaatgatgtcttttcttattgattgtcatataaacttcatcatcatttaatgtttgattttcaataatactaatcttttccatcatctttgtaatttcttcacttacaatatcatctgttataggacagtaggcattatcaggaacaacaatgacacgtgatagtatataaggtaatgatacaattgcatcatatttattattaagttcctttttacatcccaattcataaacacatgaggatacttctacttctatagaatcaaacatttcactaattgataactgttttaataaagcaatcgatgcaaaagatataaagccataaggataaggtttacatgatgtattcatagatatatatatttctcctaaaccttgtctagcttcattcacatttggtttagtagtaatttgattaactaaaccattagttcctatcaatgcattgatagaacaagtcatcccatgtttaacaagattacatacatttaatccatttttacaagcaatagctggaataaaacttcctgccatcgatccatgactacctctattcccgctggcataacaacttactaagccaagagcattagaaatttgttctttattaaattctaatacatagcttaatgctgcaacgacaccaaatccaccaataattcctgttgtataataacctttataagtgttgttatttgaaaataataatactcccattctacattcaacttccattccaatacataaggctgttaatattttttttaaagaaatactttgtgttcttgcaattgctagaagtgcactcataactggtccagttgggtgagaagttgtttcaaaatgaatatcatcatatgcataaatagctgatgcataacaatctatcaaggcaacatcacttaaagacatcttttcctttctacctattggactgtaaataccactatgatcgtctaataaactattaatcactacatcaatatctgaattctttgaccctaagtaagttactcccaaataatttagaaagacatcataataatattcaggaatactttctacatgatttaataaaatgaattctatgagttcattaataactaattctaaatctttcatcataatttaaccggataaatagcagccaatccaccatcaactagtaattctaccccattaacataactcgattcatcagatcctagaaatacagctgcgtttgatgtatctttgacattcccaacccttccagcaggaattaatgtggagcgatactgttgaacattttgttcttctttaggatctctccctaattcttgtccagctgcatcagtaggaataataccaggagctaaagcattaactcttatttttctatctcttaattcatttgtccatgtatggatgaatgatttcattgctgatttagcagcgatatataaactaaatttaggtaaacctaatgaagttgtcacagatgtatttaagataaatgttgacccttctttcataattggtagacatgattgtgctaagtaatatgttcctaatacgtttgtatacataacacgattaaattcttcttctgttacatcttcaattgctatataattgcctacaccagcatttgcaatcgcaatgtctagatgccctttatctgcttttattctgtcagctactttttggttatcttccttcttcgtaacatctgcaactatataggcaatgttcttaccaactaaatctactgcttcttgcaatttcttttctcttcttcctgtgatgtaaacataggcaccttcttctacatatctcttagcgatatctaatccgatgcctgttcctccaccagtaattaaagcaatctttccatctaatctcataatgtttcctcctctaatatacaccacaattatagaaacttatttgataaaagtacaataccaatatagaattgtgctataatataaacacatagtggaggtatcaatatgattgaattatatcaattagaacaattagtatgtattgctgaaaaaaagactatttctaatgcagcacaagaactattaatctctcagcctgcgttaagtcgttcaatgcaaaggttagaagaagactttaatgttcaactatttgatcactacaagaataaagttgtactcaataaaaatggtgaattggctgttaaacgtgcaaaagatatccttaatagagttgaaaagatgaaaaaagatgttcaagatcatgatttatcatttaaatcagttactattgcttcttgcactccagctcctatttgggatatagaacccatcatgaaatctttatatggtgagttgagctttatctctttaatacaagataaacaagaattagtaaaagcattaaagaataaaaatgcaaatctaattatcactccttttgaagttaatgattctgatattatatgtacacattatttagatgaagaaatatatttatcggttcctaaaaatcacccacttcataataaagatatgatatcttttgaagatttagaaaatgaaactatgcttctttattctaatattggtttttgggcagagctacataaacgcactatgcccaagactaagttcttagtacaagaagatcgtcaagcatttacagaaatagtaaaatcatcttcacttccttcatttacatctaatctttctatcaagcgagaaggagaaataaaggataaagttactattcctttctctaacgatgaagcaagagtatcattctatctatcaatattaaaaagcgataaaaataaatatgcaaaactcatcaataaaatagagaattattatgattactaataaaaacctcatagctataattatatagttatggggctttattattaaataacataattctattttcctatattctataaactaaaaggatctccttaacatttcacaagatatgaataacttcctcttgagccagtaataattgcatattgatttatcaatgttgaaatacttcccttatgatgataataatgattatctattatttctaagatattgtgtacacaatcgataataagatgattataatatttcatttgtaataagttcataaagatattggcaagctgctttctatttgtataagcaaactcaacagcatgttgatgacccaataaataatcatcaaatttttttgtacctacttgtaaattttgataacccctatatttttgataaatagcttcaccgatttgtcttgaaccagaatgaatcaataaatacaaatgattcttatctaattcaatatcttgataaagcttatcaatttgcgtcatctcaacaaaatgatttccttgaccaatagaattttcaccacaaatacaacttccctcaagtttctttttaaccttttcaatatgaattttctttaacttcacatcagtatcttataaagcaatcccacaaccaatatcatttcctatcaaacttggataaatgacattcttagtaacaatggttgttcctactggtgttttagctggatgtaaatctggtaaaccaacacaatcaacaacgcctagatatttttcaatattttcaagttgtcttattgcctctgtttccatccataattgctttttcaaagagataaaaaacatgtttcattaactcaagcaggtcaactcttttatcatggggctcaaaatatattaaaacaagttgaactttcttatcaacatctagaagcctttcaaagaggagaaagaggaacattaaaaattggttttttaaaagattttgattttgaattattaagagagtttataactgaatttcatcaaaagtatcctcatattcaattagaattaggtggatatacaagaaaaactttagaatcattattattgtctggtgaattagatatcattttaagtatagatgctttagatactcctgactttacaaaagtctttatgagaaaattcccattagttgctgtggtctataaagaacatccactagcttctaaacaaagcatctgtgctgatgatttaaaaaatctgatttatgatatcagacaagaaaaagataatcagccaaatattgaattagaaggggcacttctacaagtttcttgtaatctaggagaagcaattgtccatgaatttgtcattcaacaaaatatccgttcttatgtttctatcattccattaaaaccaactcaaggtcgcgatatttatatgatgtatcataagaattgttataatcaactgatttcacactttgaatccattttagaaaatagaaaagctatatcaaaatagattatgcaaaaatagtttatgcatttgatatagcctttttatttattcattttcttttctttttttatagactacaacacttacgacgaaagccattaatgctgttaaagcaaatccagccaataagctttgatcttctgtttttacaaacgttgtttgttgattatcaacaattggtttcttatcattattatttggagtttggttatcattgttattaggtgtttgattattattgctatctggtacttgattgtcatcaggatcttctttatgatcaagatcattgatgaaattaattgatgcaatatttaattcatctctatctgatagtcctttagcaaaaatttcacccattctttttgaatcaacaattttaccattttcaacaatgaccaaaccacctttccaaaatggatcactaactaattgttctttaccacattgaatagctttagcaacccaagatgcaaattgtggattattcaaatatggtgtatgtccaccaatattataacgaatatcattttcttcaatatattttgcagactttaaagcaccatttaaccaactatcaatctttgacatcatgacagttccaccacctaaatgcacttgtgctcccaatgtatcaccactataaagaactttatttgttaaatcagccaattgtccccctcctggtgtatgttcatcaggaatttcaataaattggaaagtattatccgcagcaattattgtctgcatatctttgattgttgtataatcaaataattctactaaatcaacaccatttaattttgtatgtggctcattttctggccagacaagtgttgttatttcttttaacctttcatccttagcaatctgagctaaattgtttacatgatcaccatgattatgtgttaagaaaatctttaatgattcacatttatcaccaatcacactcttaatcacttgattaatcacattttcaccatagaaatcaacatcaatcataaatgcttcttttccatcgctgcttacatagataatcggattctccaaatcagtaccatttaacatgtaccattttcctttaccagcattctccatttcaatcacaaagaagttaccatattgttttgtaattggactttcacgttctgctctatctgcatcaatagccttttgatcaaatcccatgactaatgatgtaatagaatcatcagcccctaaatcatatccccaccatccatgagaatcaatatggaatttcaatgatacatttccttcttgacttgttgcaataacatctgttccaccacgagtcatttcttgattaaatacttttgaatcataaacagaatccatatcatattttaaatttgtttttggattcatatcattaatttgatctaataatcctaataattcatcaatatatgctttatcaagtttattcttttgactatcaatcacactatatccaggattagcatctaataattgtttcacttgttttacatttgtatagaagttaagcatattataataactcatacctgcttctgattttccatttagatattctgaatttaaataaacatcttttaattgaataaaagttgttattgttttatttttctcatttttgattgctcctaaatctaatgtattcagatgattttttagtaattcagaaactttttgatttgtttttgatccatctttttcatatctaggaataataacttcatgaatagctttatcataatcgccaaatgcatttaaatcatttctaaatgaaatagaagcaatatttaactcatctctatcactcactccttgagttagcatttcaatttgtctttcttcagaaataacttttccattttctacaacgattgttgttcctctaccactaccaaatgaatgatcttcttttaaaactttatcttttgcatattgacatgcagttttcacccatgttgcaaatgccgtatttcctaaatttggtgtatgtccaccaataaaatattgtatatcataagcagctacatatttttctgttttctctgtacctgcaatccaataatcaatacttgacattgaaacatttgttccacctaaatgaatttgtgctcccaatgtatctccaacatataaaactttatgagttaaatcagcaagttgtccaccaccgactgtatgttcattaggaatttcaataaattggaatgttgtctttgaaaattgaatcttgtccccatctttaagcttaataattttatctttaccaaatatattttctccatattggctgttataatcattttctggccaataaacttttgtcattgcttttaattttgaatcacttgcaattactgataaattattaatatgatctggatgattatgtgttacaaatacatttaattctttacatttgtctcctataacatctttaatcactttatttaagacattttgtccatacatatcaacatcaattaagaatgcttttgttccatcagcacttacataaatcatgggattttctaaatcagtagcattaagcatatagcacttatcaccattatcagtatatcccatctcaataacaaagaaatttgcatattttgatgttaagtctctttgattttcataagttgtttttgcatcatatcccattggtaaaccagtaatagaatcgtgagctcctaaatcatatccccaccatccatgagaatcaatatggaacttcaacgatacatgtccttctcgacttgttgctataacatctgtaccacctagttctttatgagtttgaaatgcttttgaattaaatattgaatctttatcatattttaaatttgtacttgtgtcaaaatcaataatttgagcaatcaaaccatgcaattcatcaatataaccagcatctaattgatttccctgactatcaataacactgtatccactattatcttttaataattgtttaatttgtttaacatcagtaaagaaattaaccatattataataactttctcccgctggagatttaccatttaaatactttgaagctaaatatgtattctttaattgaatatcaactgttaatgtcttagccttttcattttttaatgcacttaaattagatgtatctaattttgcttttaaatcattagaaacaggaacatctgttttttgaccattatcccatttaggattagtcacttctttaatagcttcttcatagctagccatcacttttgattgattttcagttgctttaagtgctttcttttctacaagagatgttgtttcttcaaccacttcttctttttcatttgttttagaagattcttttaaaacttcagtttcctcagtttgaggcgctaatttttcaatagtttcttgagcatagacacctattattgacccagcaccattaaaaatcatagtcgctgttaataatgagcatgctattttgttttttgttttatttttcatactttccctccttgatctatatttagtatatcatcattgtaagcgctttgatattttgtaaaaataaatgaacaacgtcttttgaaccaaatattagataaaaaaaacatgtctcattttttgagacattagtatatttttattaagaagaaaatatgtttgttgaaatattcaataaatatgatagaatcaataaataaaataaaaaaaccactttcgtggttaggtttctatctggctggggtacttggattcgaaccgaggaaatgtcagattcagagtctgatgccttaccgcttggctataccccaatcatctactatattatagaacctttttttcaagaagtaaaggagaagtatatgaaaatcagaacacgttttgcacctagtccaactggctatatgcatattggaaatttaagaactgctttgtattgttatttgattgctaaacatgatggtggtgacttcattttaagaattgaagatactgaccaacaaagagaagttgagggagctattgacttaatctatcaagtgatggaagaaactggtctctattatgatgaaggtcctgataaagatggtggtgtaggaccatatatccaatctcaaagattacctatttatcatgaatatgctcaaaaattaatagaattaggtggtgctcactattgtttttgtgaaggtgaattagaaggcgaagatccatgtattcatttatcacaagaagaaattcaagaaaagttaaatgaaggtattcctcatgttattagacaaacaattccaacaactggaacaacttcttttgatgatgaggtttatggacatattgaagtagaaaatcaaacattaaatgaaggtatcttaattaaaagtgatggttatcctacatataactttgcaaatgttattgatgatcatttgatgaatattactcatgttgtaagaggaaatgaatatttatcaagtacccctaaatataatttaatttataatgcttttgattggcaaattcctacttatattcatttaccacctgtgaataaagatgaaacccataagttaagtaaacgtaatggagatgcttcttatcaggatttaaagaaacaaggttatttaaaagaagctattttaaattatattgctttacttggttggtctccagaagatgaagaaattttatctttagatgatttaattcaacattttaatattgctcatatatctaagtcacctgctatttttgatattgataagttaaaatggatgaatggtgtttatttaagaaatatgtctttagaacaattccatgaattgttgttaccttattatcaatctattaccagagatgttgatttattagaattatcaagagttttacaaccaagattagaaaagttatctgatgttgaagaaagtattgattttattaatgaaccacatccatttgatgctagtatttatacacataaaaaaatgaaaacaaatccagaaaattctttagaagcattattacttgttagagaaagaattgaaaactttaatgaattcgataatgatgaagcaatgagtgatttctttgttaatcttgctaaggaaaaagaattaaagaatggtcgtattatgtggccagttcgtgttgctttaacaaataagtcatttactcctgggggagcagttgaaattgctcatatcttaggtaaagaagaaacattgagaagaattgatcaagcaattattgatttacaacaataacaaaaggaatggaagtataatttatacgaccattcctctttttgttatttcacttgatttttctttttcttgttgataagtaatgccatagcacacattgatatacctaataatcctatatacatttgatattgtgtattgtctgatgtttctactttttcttctgttgttggttgattgttgttttgttcaggttctccaggtttattttcatctggtttgttttcgtctggtttatctggtgttacaacaatatccacttctttttcttctaatttttctactgcttcttgtaatttctttacaattgcatctactgtttcttgtgttacagtttcatctttatagatttcttctgcttcttttaatactgcagtcaatacctctactgtttcatctgtatataattttgtatcaatcacttttgcttcttgaatagctttttctaaagctttcttatcagctttcttgactaatgctttgatggctgcatttaagtcttctacagctttatcaacttgtttttgtgttgctttttcatcttcatagattgcttttacatcttctaatactttttctaattccttaactgtatcttggatgtataattctttatctatttcttgtgctttattgatagcttcttctaaagctttcttatcagctttcttaactaatgctttaattgctgcatttaagctttcaacagctttatcaacttgtttttgtgttgcattttcatcttcatagattacttttacatcttctaatactttttctaattctttaactgtatcttggatgtataattctttatctacttcttgtgctttattgataacttcttctaaagctttcttgtctgcttttttaactaaactatcaattgcattcttcaattgtttcttagcattaagaatttcttctggagttgcttttttatttttataaactgcaattacattttctaatgcttcatgatatttagaaacacttgctgatgtataaagacttgtatcgatatttttattttcatcatagtatgcttttaaatcaccttttaaagacacaccataaacttcgaattcccataaagaatatccatattctcctactggttgaattcctaacattcttacatatctgccagtagcaggttctccataattaaattcagtaatacctttcttaccatcagttacatgtgtgatatcagtccagttttccccatcattagaaacttgaagcttatattccttaccacatgctccttcccaatttaacacaatctttgaaatatagtaattatcttgtaaatcaacataaatccactcgtcatttgatttacgattagatacccatcttgattgttgatcattaattttatcagtatttccatcaaaagctaatgaagaataatattgtttatttccatcatttggatcaataaattcagagcttgcttttgaaggtttgtttaaagcaatatttgttgtattaggtttttccgttaattcaccatagacttcaaattcccataaagaatatccatacttagctccaactttaacaccttgcatcttaacatatcttccagtgattaattcatctagcttaatttcttgaacccctactccatctgttcgatggacaacttcttgccatgtttcttgatcatcagaaacaagaatcttatactcgtgtttactagttccttcccaatttaagacaatctttgaaatatcataagtatcttccaaatctacataaatccattcatcatttgaataatcacgattagatacccatcttgattgttttccattaattgttgttgatgatccatcaaaagctaatgatgaataatattgttttttgccatcattttcatcaataaattctgagcttgcttttgaaggtttatttaaggcaatattaatttcttctggttctggttcactttgttctcccacaagtgctccataaacttcaaattcccatattgaatatccatatcctcctactggttctactcctaacattcttacatatctaccagtagctggttcttcataattaaattcagtaattccagctttaccttcagtcacatgtgtaatatcagtccagttttctccatcttctgatacttggagtttatattctttagcatatgcatcttcccagttcaagacaatattactaatttcataagatgcttgtaaatcaacataaatccaatcatcattatgtttacgatctgatgcccatcttgattggaaactatttgttttttctacacttccatcaaaagcatttttagctgataaagaactgctatattcactgcgtgcttttgcaggtttatttaaagcaatattagctgctgtaccgtaaaccttgatttcaaagatattaattccatagttctttccactaacaattcttgatttaagtgaatgaaccttaatatagcgtcctgtcactgcttcatcaaaattaatttcatcagttagagtttgatcagtttttaatgaagatttgactgttttccaatttttattatcagataaaacttcaatctgataattatctgaacatgcagcttcccaattaatgacaactgcattcatatttgattcttttcctaaatcaatactaatccattcatcatttgaatcacgttttgatgcccatcttgtagaagtatctccatctactgctaaacttccaacaagcgatgaatcaacattagaaatagaacttgtcgtagttggttgatttaatgaaagaagttttccttcattaaatgttaattctttaatttgataatgtttgtccttagcagatttcatgacaatctttacataatgacaaatcttaccaatattaattgtttcttcttttccttttccatctttgacagatgagattaattgataattttctccatctttagaaatataaacatcatattcagttgcatattgatcaccccataagatgttcatatctttgatatattgatctgtacctgtaaatacagaaatccattcatctttgtttccttgactttcccaatatgttgatgtattttcatctacaacatatttaggtgagtgtccttctgtgtagctgcttgctacatatcttgcatcttcaccttcagatagagtgatagattgacccgcatatggtaatgcgcgtgttgcaaatacagttgatgtatttacttcatcataagataaatcaacatgaactgttctatgagcaacataatcattggcagctactgtgatttctctttgttgttttgattcatcaatcattacactacaaggttgatctactgtaattgtataacctggtttgtattccaaagtacctgctttatagaaattgatttgtgtttgtttcaatccatcatgacgaactgcttgaatttctttagtattgcttacaattgtcactgggatatcattagcatattcacttacattttcagctgttgtattaggtacaacaatatatgcataacttgcatctactggtttcacaccatgatctaaccacgcagtgaaagttgcaggtgttgatttctttttatcttctggccataatgatgggttatctgcttgtaatgcattacttacaacaactttttcttctttagggaagacataaccaactttatcattatataaccactttgttgtatattcttttttctttgttccttctgccactgtttgattgtttacaataacattgtctgcttcactttgatttaatgttgtattaatcgcaacactttctttagaagtaattcctgcacccaatgcaacaaattcatcatcaaagaagaaatatcctttcgatgcttgggtatttttcttattcattgcataagaagtagcaccgtattttccatttgttacaccaatcatatgatcagttccgtttgtaaaacgtcctgagtttgcataatccttaacaatacgagctgctgttgttgttccaggacagtgtgcccaatcgtaagttgggaatacatttgtatattcatcaccatcgactgtaattgttgaagcagctgatgatgtccagtaaataagttgtcctccatcttttccagctggccaacttccacgccattctccaccaatgacactcttagaatccatcttaacattgacaccataaccatctctcatatgagatgcataaccagatctccacatgtaatagtttccatctttaccgtttgatgttgtttttccttcaatgttatctaatactttctgatattcattggctcttaatggatctgaatcaatcattctctttaatggttcaatatattcagctgcataattcttatatccaacttcatatttatatggacgatatccaagatataattccatgatatctcctctgattgtccagcttgttccattgagcatatagttacccattcttgtcacaacttcttgactgatagcaaactctgttccacgtaacatataaatccagaaactcatatctctaaacatagacattccatatccgtttgaatagaattggcgtccatgcatatagaaactgttatctacttgtactgcttcagctgttacatcatcttcttgagttgataaacaataatctaaatagtcagtaaccatttcttttaattctttagcatcattagtcaataatgcatgatatacccagttttggtcaaaccataagttgttttgccctggtccatatttaactggtgttttttctttaagtttcacaagcaagatattctgtgcttcttcgcttatgatgccatccataaataaggcaatacgagagaaacgtaatggaactccaacttcattttcccaccagtttgtagaataaggtccatcaggtttgttatcacgttttccctgagttgaccaatatttaatagccttgtcaagtccatttttagctgcttcactgtgatataaagcattgccttccttatggtaagctatggcaattgcttgtaatctatccaatgctaaatatggtgaccaagcggctccattagctgcattgttgtgagcattgtaatctacatcttcaaaagctccttcctcattgataagcttaagataatcttcagcttgactcacatagcatgtttctactttagcaccatcatcaattgtatcaagcgctaagaaatactctttcaatctacttttaatcaggttcatatcagtttgagatgttgccctcacaacacttccctgaccaaaaataagacttaaaataagtgttaaaactaaaataatcttattcgtcttttttaacatatccttttcctccatatgtgtaatcgcttaccttacatatacatttttaatgaaaattacttgaatttcaattctcatttacttgaaaattcaaaaaaagagattctttctttaacctaaagaatctctttcgacaattttcacgcttaataaacgtgtcatagggacatcatccttacgatgtatacgatccattaaattagatacagctacctgtcccattagttctttttgaacctgtacggttgtgatttgaggaactgatttaacacatagaggtgtatcatcaaaaccaacaacacttatatcttctggtacctttattcccatctgggtcaaagcaagtataactgcaaaagcattagagtcattagcacaaacaagaacctctggtaattgctttgaactcaatatttttacaatctctaaaatattattagacaaaatatatttttctatatcttgtgtaaaagaatattcattgatatattgatcaatatcatccatattaacaacttgatttttaataagagattgcttatatcccataaaacgatcctgaaaactaaatgaataactcaaatcaccaaaaaagccaatcttttgaaaaccttttttaataatatgacttgtcatcatatatccaccttgtttattatgtgttaaaacacaatcacatgaatctcctaatgacgtaaaatcaactaacactacaggaatacctgtcttttttaaagttgataaattatcatcagatatcttaccaaccaccaaaataccagctacttttctttcatcaatacattctggaataataaattcattatcctcaaaataattcaatatcgaaaaatatccaaaagttttagcttgttccacaattgaacgcaaaacaatcgaataaaaatgtcctgtatcagcataataactttgcattaaaacacaaatatttgttttagaaaatacagacaaatattttcttttctgattaatataacccatttcatctgctgtacgtaaaatttccaaacgcatctcatcacttacccctggtttatcattcaacgctattgaaacggcattaattgatataccaagacgattagcaatatctttcattgttattttcatgatattaatcctctcatatttttatccttcccattataacataaaagtcaataagacaccctcatttatcctattgacttaacacatctacaatccaatacttattataattcttctccatttgtttcaatcacatgtttaaaccattcaaatgatttctttttaattcttttcatatcttttaaatctttattatctctattgacataaacaaaaccataacgttttttcatttgtgcacgactacttaaaatatcaataggtccccatgataaatagccacgacaatctacgccttcatcaatcgcaagcttcatttgttcaatatgttttctcatataatcaatacgataatcatcaataatttcaccattttcatttacttgatcatcatatccaaaaccattttcaacaatatagattggcatttcataacgatcatataattgacgtaaagtaattcttaaaccaattggatcaacagtccatccaaattcagacatttctaaatatggattcttcttaatcacaacatctttttcattagttaagcttaattccccataatgagaaattgttgacatataataactaatagataaataatcagttttccctttttctaagatttcaaaatcaccctctaatatttctggtaatgttccttcatttttcatatttgcataataatatgaattataatgacctctcgcaaaaacatctaagaatacataagcttcactttgagctttcatactttctaaagtatctaaaggatggcatgtttctggatagctttgaacaactgtggccatccccataactttacatcctttttgatgaatatattcattaactaaactatgagcaattaaggtattgtgcataatttgattatcaaaagtttgaggattcatcccttcaggacaaataccaccaaagaacatttttggacctttttgtaaaatcccattttgttcattaaagataatccatttattcacttttgaagcataacgatctacaatctttttacataattctacgaaaatatccacaacttttcgacttgcaaaaccattatacttttcttgtaaataaactggcatttcaaaatgatataatgttggaattggttcaatccctctttttaataactcatcaataaattcatcataaaattcaaatccagcctcattataagtcttttcatcactcatcatacgagaccaatcaattgaaaaacgataagcattgaatcccatttcttgatataaatcaaaatcttctttatatctatgataagtatctataccatctttaaaatcagaaaattcaccagttgttgttaaatcacaaacagcaggaacttttccaccttcgttatatccaccttcactttgatgagcagttactgccccaccccataaaaaatcttttcttaacatcacttttttctcctttgtccataacaaataagttttatagtttcattacatttttaactacacgcttattatgtcaatacttcacttgaataacaagcctcatttacttgaaaaaacaacgtttatacttgaatttatcaaaatatttatttcaaatctctttttaaacacttttatttcttcttaagtattacctatataaaatgacgcctatctaagcgtcattttatgtttcaaaatataaatcagtttaaaccttacttcttttctttttcttgttgataagtaatgccatagcacacattgatatacctaataatcctatatacatttgatattgtgtattgtctgatgtttctactttttcttctgttgttggttgattgttgttttgttcaggttctccaggtttattttcatctggtttgttttcatctggtttatctggtgttacaacaatatccacttctttttcttctaatttttctactgcttcttgtaatttctttacaattgtatctactgtttcttgtgttgcagtttcatctttatagatttcttctgcttcttttaatactgcagtcaatacttctactgtttcatctgtatataattttgtatcaatcgcttttgcttcttgaatagctttttctaaagctttcttatcagctttcttgactaatgctttgatggctgcatttaagtcttctacagctttatcaacttgtttttgtgttgcatctttattttcatatatcttttctacttgagataaaaccatatttaatttttgaatacttaccttagtatacaatttgttatcaattgcttttgcctgattaataattgtttgtaaaagagcagtatcagcacgttcgactaataatgtcatactcgtttgtaattgtgataaaacttttgtaacatcttcagtagatacattttcatcttctaatacaatcttcgcttgactcaatacatttatcaatactttataacttgttggagtatataaagaagaatcaagtttttctgcctcatctataaccttttttaaaactgttttatcagcttttaaaatcaaatttttatatgtcatttctaaactttgggaaactgtttgaatttcatccaaagtagctgcttcattttctaaaactatttttacttgagctaaaatcaaggcaaaatctttataactatcaggtgtataaagtgattcatctaaagcctgatatttttcatacaatgactgtaaatttgctttacacgattttccataaacttcaatttcataaagtgaatacccatatcctgttcctctttgaataccctgcattcttacatagcgaactgttgtttcttttaggtaaatattttcaatatgaccttgtccattttcttggtgatataattcaaagaaattttctccatctaatgaaccttgaagtaaatattttttaccatatgctgtttcccaatttaatgtaatttgatctattgtatacaatccatgtaaatcaattgttataaattcagtatcttttgcttctgatgcccatctcgtattcagttttccatcaattgtatatttaggattattactatcagtttgacttgatgcagttgcagttttattaagtgcgatattttcaacatcttgatttgaaatcgtaacaaataattcgccttctttaccactaccatctgttgctttagcaactaccttgacagtaccattattttttggagttaagataccattttgagaaatagtcgcaatatctgtttcttttccatccacatcataaacattccaaataacatctttaaccgttgcattttcaggagttatcttggcatataattgtaattgtttatttttctttgtaatttcatttttatcagaatctgatgacaattgaatgttttgaacatatgtcttttcatatggatttccataaacctggaactcccacaatgaacttccatattgtccacttcttttttcacattgcattctcacataacgagctggtttttgttcaaatgttttttcttcaatttgtcctttcccatctttttcaacatacaaatcagtaaaattcacattattcaacgaaccttgaattttatattttgatggaaaagcttcccaatataaaacaactttattaacattataaacatctcccaaatccacagtgatccaatgattatcattttggataccagatgcccaacgtgtatctactttcccatcaaaagcatttttcactggatttgcaccctcttgattagaagcaaaacatgttttttgatatgctaaattatctttatcttgattttcaattgtaacaagaagttcaccctgtttttgactaccatcaactgctttagcaacaacctttaccttcccattagcatgaggaattaactttcctgaagatgtaatctcagctaattgagtttcttttcctaattcatcataaacataccattcaactctttgatctgttgcattttcaggatgaatatgagctgttaattgtaatggtcgatctttagttgtaattttattttcagagttttctgaagttatttcaattgatgttattgcttgatcaatttgataatttccataaacatcaaattcataaagagaacatccataacgagatttttcatcagtataaatacgaacatatcttgcagatttagcttcatcatattcaaatcgaacaactttttttgaatttccttcatctttaatagtactaatcgtttcccatttatcagcatcatctgatatttgaatttgatattgaggtggacgtgcatcttcccaatttaaaacaattgtgttcacatcagctattgaccccaaatcaacataaatccaaggatgtgcttctgaactatttgctatccaacgtgttgtaacatcaccatcaacagctaatgaaccttgatgattgtcaccaactgaagatgtaacaacttttttatcttgagacaaacttgctagagtctgaccagtaatcgttacaatcttttctccaacaacaccacttccatcaattgtttttgctataatttttactttcccatttttctttactgttaaaagcccatctttagtcattgttgccttatctgtagaatttccagattcatcaactactgaccaaataattcgacgatccataacattttgtggctgaataatcgcatgatattgttcaacttgatctttttgattaatcacatccacgccatcaatcatcacactactaattaattcagttcctgcatcaggtaaaatttcagcacttgagctggcaactaaaacatcatttataaaagttttttctccatcataagttacatgactattagcaggtgctaaaacaatcacacgtgctgaatcggccaacatcttaaaactttgttttccagttacatttttagctaaataagttccagttacagaatcatataaatcataagatttatttcctaaatctatttcaacattacaactttccatattaggattgtaatataaataactttgatacatatcatcttgataataatctgttttattacaatctaattgtaaaatattttcaacatttgtttgatgtactaacgctcctaaaaagccagtatagaaaccaccatacagaccaaagttcgttgtattttctccagccatccaaccacttgttgcattagctttagcatctccagttgcatagaaattttgtccatgatcattttttcttaatgattcataagccaaaacattttcttctttttttcctttataatcaccatctgtttgatgttcttcactccattcacttggtaagaagtatttgcagttattggcaatattattagcccatttaccagccattcttgcatagctaggatcatattttgcagctggtaaaatagaagtcattgggtatgctgaattaaagaaatatgagtacccattatttggttcaccagtcataccataaacgtcaataccatcttgtgaataattgacaccaccccagtttcttactgaactgctgctatttgttgttatccatttaatatatttagatgtatcataatttgttccttgttctgcattcatcattgttgataaataaacagcatcaattaacatattttcataatatggatttttttctagttgttctagataatccatgcaatattttgaatactctaaataatgatttgcacttttagaatcagtatctttaaaaattttataagcataataaagaatatttgctgtccctactgctgcatctggttgaacccttccctgccctggattttttactggtttcatatccttgaaattgtaaccttgaatattaaaatcacattttttaggatcaccatttcctaaattttcaaccatcttacacattttatcggctaccttcttttgtaaatccaaaactaattcaggtcgccaatcaggatttaattcagctaatctaaagaaattttgattagctattaacatataccaaaaatcgtcaaatgcttgatatgcacctggcatattttgtaattcactcatagaaccgttaggaacatttgtaaaaatatttgttccatccactgtccaaaaaaactttaatgcattatctaaataagtttcatattcaaaatccaattttccgacttcatcaacaacatcttttgacacttgcgcttttaattcttgaggtaattgtttattcatatcaatccccattaatgatgcagcaatcaatgcacttgtaacagagatagattcttgatcatcttcaccatcatgaactctattgaccaaaggtctattctcaccataaaatgctggaatcatatatccaccatatttatcatcacgataaatagtagaaaatgttctaccttttttgactgagaactctgtttttttcgagaaatctgttgctgtataatcaaaaataaaatcatttaactcttttcctctttttaaccagtcaataattttataattgcttggagaattaggcattttttcaattgtatcaatactctgttgttttaaatttctcccttgcctcgtttcctctgcataacacattgttacttgacttaaagcaatagctgttacacaaattgtacttaatatttttttccctttcaatttaatcatcctttctttaccttctattatttcaacatttgataatctaaacaattagcatttacttgaaaaccatatcattttacttgaatgatatagtttttcttataatgagatgctataatcgaataaacgaggtgaaaaaaatgtcgaacactgtaacaatgaaagatattgctcaaaaattaaatgtttctattaatgctgtatcgattgctttgaatgataaagaaggtgtttctactgaattaaggatgcaaattctagaagcagctactgaaatgaattacccttttaaaaagttaaatgtcaaagatactttaaaaaataaaactcttgttgttatgattgaagataaaaaaagagatgatcttcattattatctcgatttattaaaatatattattgatgaagcacatatctttggttatcgcattttcactgaattttataactttaaaaactttgttacaccaaaatgtattagtgaataccatgtggctggcatcattgttttaggaaaaattagtgatgaaatcatttatgctttacgattatataatcaaaagattatatgtgtaaatcattctatcccatatttcaatgttgatacaattattaccaataattttttaggtggttatgtaagctgtgaatacctgatcaaaaaaggctatagaaacattggttttgtcggtgaagtagaaagttcgaaaaattttaaggagagatatcaaggttatcgtcaatgtatgattaatcattttcatcctaaaaaacacgagttcatatgtttaactaaaggtattgaaaaggcggttttaaacaatgattatcgttatattcaaaaaatgttattaacttatcggcaaatgcctcaagcatttgtttgtgttaatgatcgaaatgctgcaattgtgattaaagcattacaatataatggatataaaatacctgaagatattaaaattattggatatgataatatggaattttctaaatctcattatccagcattatcaaccttagaagtcaatcgacaaacaattgcaaaaaaagtaatacgcagaatccatgaaatgattcatgaaaacactatcccagaaacaattatgttatcaccacaagttatagaaagagaatcaactttatgaaaaatcataaagtttttttgtaaacaaaaaaataccgtttcttcatttaagtatgactctctttatgcattgttctttgattacataaataattttttttaaaatactatgttccttttaaatccaatttttattatgtaaacaatttaacacaataataagccttgtttacttaaaaaataaaaactttgaagtaaagattgttattgtataaaaattatgatacgattgttttgtcacgatatagtgacaataaagaaagagaggagattttatggaacaatattttttagaaactgatcaatgtcaattgaaaatttattctattaatcctgcacaaagtcacattgctatactatttttacatggtggaccaggtagtggtgcaatggcacttatgggattaccagcttttcaattattaagtcaaaattttcattgtctttattttgatcaacgtggttgtggagattcaacatatgatttaaagaaaggattatccattgaacagattactagtgatgttttacatgttattcaagatagcttacaacgttttcatattcaaaagttctatctatggggtggttcatttggaggatatcttgcatgtttatgtctagaaaaatttcacaatgaattatcaggaattattcttagtagtcctgcaatcacttttcatcgtcaacaagctttatctttttatcaagctatgcaatctcaatataatcaaagattgggagaaaatcattttcttcaatcgatatctttatcgcctgaagatttctttaaacaagatgatgtgagagaatttatctttagtgtaaacaatccatcacattctttacagcacatctgtgcgatgtcagattggttttttcaacaccattttcataatttttttactcacctttctttgccactattaatcatgcaaggacaagatgaccctatttgtcaatatcaatatattgataatgaagtctctcatcttaaaaatagagaatatcatctctatgaaaattgtggtcacgaaatattctgtgattgcaaagaagattttgtaaaaacaataactgaatttataaggaggaatgaacaatgttagtttatatttgttgtgctggaggagcgacttcaagtctattttgtcaaaaaattggtcaagcttcttcacaaaaagtcttagttgaagatattttttcagtcttaaaaaatttagatacactgatggattcgtatgatatgattttggcttatggtcctgtggaatttcttaataaaagaaccgttcaagaatggcaactcgataaaaaaattgccagcatctggatagcaccacaagttcgttatttaaaagaaatggttgataaagtttttaataattatcatattcctgttcatcttattgatatgcgtgcttttggaaccatgaatgggcaaaaagctttagatgacattcttaataacttatgatacaatttcctcaataggagttgatatatatgatagacttaagtcaagttatgacctttactgaagctgctgaaaaatggggattagccaatggaaatacaataagaaaagctgttgaaagaaaaagatttcaagaaaatgaaattcgtaaaagtggggatgtctggttaacaacatatgaagcaatgcagcgtgtttttggaaatccaaaacattctgatttcaccatttctatgacatcattatcacaatatatttcacagtctatttataaagataatgatgcaaaaaaacaacttgaaaaaattataactgacattcaaaaagctatcatacaacataaaacagtaactataacaactcatgatgatcaagagcatattgtgatgattcttaaaaatgaaactgatgtagaaacattcactaaaaatataaacagatatttagaatctgtttcaatatcactccataacaagacataaaatctataatatacccttcaagaaaggaggctataacgaatcaactttctaaaaagttatttcgttacagcccctttcttttttaatactatcaaagataatttatgattatatcttgcttttgttttatgaaatgaaacattaattcaatatcagttgacttattaaatttttatttttgtaaaaaaaagaatcaacctgaataacaagttaattctttcaaaattattaagctttaccaatgcaaccgaataattccattttttctttaacacattcttgaattgcagcagctccaggagctaataatttacgagggtcaaatcctttaccttctaaatctttacctgcttcaatatatttacgtgtagcttcttggaaatataattgacattcagtattaacgttgattttagaaactcctaaagtgatagcttttttaatcatatcagctggaataccagtaccaccatgtaatactaaaggcatagttcctgtttctttttgaatagcatctaatgcatcaaaatctaaacctttccagttagctggatatttaccatgaatgtttccaatacctgctgctaagaaatcaattcctaaatcagcaatcattttacattctttaggatctgcaacttcaccagctcctacaacaccatcttcttctccaccaattgaaccaacttcggcttcaactgatacacctttagcatggcataaagcaacgatttctttagttttttcaatgttttcttcgattccataatgagaaccatcaaacatgattgatgagaaaccagcttctaatgcagctttagctccttcataactaccatgatctaaatgtaaagcaactggtacagtgattcctaaagaatcaaccatagcacttaccatagcagaaactgttttaaatccagtcatgtatttagcagctccttcagaaactcctaagataactggtgcttttaattcttctgcagttaataaaattgatttagtccattctaagttgttgatattaaattgaccaacagcatagtgacctgcttttgctttatcaagcatttctttagctgaaactaatcccatatgtataatctccttttcaaattttttacaactctatcatacacttattttgctcaaatttccatagatattcatattttttaaataataaaacccttacattccaaattatctttctttaattgccttttctaattgaacaagggcttgttttaaaatactacgtggacaagcaacattaaatctttcaaatcctgctccaccagttccaaaaatataaccttcatctaaccataaatgagcttgatttaacataaaatcttctaattcttcatgattcatattcaaagcacgcatatcaacccaaaccaaatataaaccttctggtttaatcactttaatctctggtaatctttcttcaaagaattgaatcatataatcaatattccctgataaatattcaattaattcatccacccattttgctccaaaagtataggctgcttcacaagcatcaagaccaaaaatatttggattattcaccccagaggcatctttttccttgataaatgcttctctcatcttttcatcagcaataataatatttgatgtttgtaaagcggctaaattaaatgtctttgatggagctgtacaaattaaagtaaactctttaaaagactcatctacattataaaatggtgtatgtgtatgtccttgataaacaaaatccatatgaatttcatcacttacaacataaacatgatgtttcttacaaatattcccgatttgttttaaatcatctttagaccaaactttaccaattggattatgtggattacataaaataaacattttcacatcattttccacaattgttttttcaaacaattcaaaatcacaatgatattccccatcttccaatatcaaaggacactctacaatttgacgctgattcgtattaatagatgcatcaaaaggataataaacaggtttcataatcatgatatgatcattttccttagtaagtgctcttacagctaatttcaaagcagtcacaataccaggagttggtacaatccattctttttcaatatcaaaatcatgtcttgtatgcatccactgtacaactgattctaaataactatctgttggatttgcatatccaaagattccatgttcagcacgtttgactaatgcttctttaacttctggcaatgtttcaaaatccatatcggcaacccacattggaatcatttgtggatcttgcattttatctccatcatattttacactatttgtattctttctattaataacttgatcaaaattatacattttctcttaatacctctttttctttaaattgatttgctgaaaaatgaaacaaagttaaacctaaagccatagataaattcaatgaatctatctgatcactatgaggaataaaaacactttgtccataatttaaataagaatcatctaaaccactactttcattaccaaaaaccaaggaatgaagtgataaactttctacttgatgaatatttttagcaccttttaacataagtggataaaattcatgatgtttatattgttgataataagtttcaaaatcatcataataacaaacattaagatgaaagatagcccccattgaggcacgtacaaccttaggatcaaaaacatcaactgctggttttataatcactaaatttgtatagtgaaaacctagcattgtacgcatgattgttcccatatttcccatatccattggatgaactaaaacgacatgatttccttccgttaaatcacattgataggttttaaatatacctattgcaaagcaattacttttagggcttaatttatcaattgttttatcatggatatctatatgaatacgatgtttttgacataactcttgaattaaaggatatcctttattcttttcaattgatgaatgaacaaccactcttacaacatcctgtggtcttgtttttaataattcaattgtaggaaaaacacctaaagtataagatgtttcatccccttttttatatatcttcatgatttatctccttgtttctatgatattcattgatttgttgagctttttgataatagtacaatgattgacgatgatttctttcaacataacgtcctaattcataaaatcgagctaatgccaaattagcatctaaactattaagttctgctgcttgaataagataatgaattgctttcttttcatctttttttacagttaagccatcaaaatacatcatagcaagttcataggccccttcttcatgcaacaaatcataagcatactcaaagtaacgatgtgcttcctgcatattcacatctacacccagtcctaatttaagacatataccaactttatataggcaatctttttgaaaaagtcttgctccacgtaagtacgcttcaaatgcctgagcatgttctcgtttggcctctaaaagcaaaccttgatataaataagcttctttctcatgtgataactcaaaataagaaagtgctttatctaaatctttatgaacatatttccctaacatatagaaaagtcctaagcgtaagctggttaaatcatccgatgtattttcataatacatcaaagccttttcgatatccatttcaatcccatatccatgttcatacatatagcctaaataataagctcctcgatcatctccatgtccatataaatatgaataaatctcaaaagctttttcataatcctgagtaaccccaaagcccaaaaaataagtctttccaattacaaataaatgttcaaaatcatttctttgataagcatcctgcaataactcatccatattaggaatctcaaaataatatccaacttcatccactaatacttcaaaaacacttactaaaaataatgcctctttttcatttagctcacaagcattcactaaataatcaacataacctctcaaatcaacatcttcatcaaaaaccattgcatcaaaaacacctaatttcattcctaaaacaaccaaataacattcatctaataaatcaggtgcttcatcattcatcgcttcttcaaaacgatcaaaatcaaatcgaattgtgtccccataatgttcaaaaacatcaagcacactttgaataatacgaatatccattaacaatcctgattaatctgatgaactgactctaattgatgaacagcactttcttttaatgattgaaagtgtgctttatcaaattgtgccccttgatcaatcaacatcaataactcatcatacttttctacaacaacttttaataaagattctttaatcacaaaatccaattcatcatttgcttgcatcatcaattgattaatagatttatactgttctttaaaaactgcatcaaaatctattttttctttctttttcttagaaaataaacccataaattccatcctcctttgctttttctattatatcaatatttgcaatgaaaagtaaacatgttataatgcaacaaaggagtgagattatgcataaactagcgtgtccaaaatgccatcaaccattaattcttgatggaaaaacatataaatgccaaaacaatcattgttatgatattgctaaaagtcaatatatcaatcttttattaaatccagataaatcaacaaataatcctggtgataataaagaaagtttaatgtgtcgtaaaaattatttaaatcaaggatattatgatgtgattttaaatgaagtggttaactatattaaagctcatcgtcatcctcaaatgcagattttagatttaggttgtggtgaaggttattatacatatcgtatgcaacaggaattaaatgatgattcgattatttatggcttagatatttctaaagatggaatccaaatggcttctaaatatacaaaagatatttattggatggtaggaaattctaagaatattcctcttgttgatcattctttagatgttattacagctttatttactgttgttaaggattcggaaattaaaagatgtttaaaagaagatggttatatgattcatgttaccgccaataataaacatctcattgaatttaaagaacttatttatgatgaagtgaaagtcaaatctgatcaatttattcgtttaccttttgaagtaagtgagagctatgattttaaaaagacgattcatttaagaaatcgtgaagatactttaaatcttttaaagatgacaccacattattatcatatcaaaaaagatcgtcgtcatgttttagatacattaggtgaatttgatgtaaccattgatattcgtattacagtttataaaatgtcatgaaataccaagtccattacccctatttaacattaatcattgattcacctatatcaatagaagaattatttttacaatttcatctttctaaaaagacaattcatttattaaaacaaaacaaagaatatactgttaatcaaagatatgtttcaccttcaactattttaattaaaggtgataaattaacaatcaaggcttttcatcaagatgatggtatgtatccacccaattatcaagagttagatatcatctatgaagatgaatttcttttagcagtcaataagccaccttttatccaagtctttcctgatgatcaaaaacatactgattcattagctaatagagtcagtggttattatcatcaatgtggctatgatatacctgtgcgttttattcatcgtttagattatgaaacaagtgggattgttttattttgtaaatgtgcatttgttcaacctttgcttgattatcaactgtctataaaagctattaaacgtgattatttaacaattgttgaaggtacagtattagatcataaagttcattatattaataaacccattgggaaaaaccgtcatcataatcaaaaaatgattgttgcttcagctggtaaaaaagcttgtacacattatcaatgtattgctagtaaaaatcatttatcactattaaattgtgaattagaaactggtagaaaacatcaaatccgggttcacctttcatccgttggtttaccaattcttggtgacaaactttatcacaaagcttcaccactgattaatcgcgttgctttacatgcttatcaattacaattcattcatcccatcacaaaagaaaagatgacattagtctgtcacccaccacaagatattctttcaattattcattctattgaccctactttgtagggtcattttgcattcttaccatcttaaaaacattatgatgatgtgtatcaaataagattcttgaatcaatttcacgacgcataccacaatctgaaaaaacaatccgataatgagattcactttcaatataaccacttaaacaaatccaatgccaattatcttcttctaattccttagcacgatgatgtaaaatcaacattcctaccggatgtccttcatcaatactctttaaaacaaaatctaaagcatgtttataattctttgatttcttttgataaaccggctttaaataacaattatcttgtttcattctggctataaaagttctggcaaatttatataaaaacggatatcccatatttcctggtgtcattagattaaacatgtcctccatcacacctaaaaattcatccttgttatatttttcttgttgttgataaaaagcatagaggttgcttgctaaaacacttgcgcagccagccttttgtgcccattcatcatgaaaccaatcttgattcccaccatatccaattctttgttgttgatcataaatgatcggcatttgtaattctttcatcgcttaacctccaaactatttaatacaattatagtctattatttaaataagaaaagaaaaaactaccataaaggtagcatttccatatctgtattcttatacgggaaaacgaatactattatagatatttgggacgaatacataatagcataatttttttatgaaagttttcatattttgaaaatttattgttatgaaaaatgaagtgtatttgtaaaatttctatgttataatcatagacggtgataatcatgaaagatagagaattaattagtagaaatattatcaatatattggatgttaagcattgtcgtgaatgggaaatatttgctggtgatgatctttatgatcagctatataaatatttagccaaattaaccaatacagaaaaagaaacaatgagtgatattgataagttaatggcaaaaaatgaacttattattaaaaaaatctcacaagataaagagattacagttggtgaacaaaatcaattaatggaaagtttaaaagcttttaaaagaaaatacttaatgaaaaaataactcggggaatcctgagttattttcgttttgtaaattgaatttctacaacaaaataagcattatcatcaatgcgaccttctacaacatatcgttcgttttcacttgcaagatataaagaaacatcttctaatggacgaatttcttttttatattgaatatttaaatcacttacaaaataatcttgatgtatttttaaatcaattacatccatagcccattgaatatatcttgtattattcatatgttgattaatatcaacatcactatataagacttttcttgttgtaacaaagctaaaaggttgatcaatctgaatatcatggggtggttctaatttatagttatgttcaactttaggtacttcaatcccaatccttttaggtgaaacaatacgtcttttttcaatatctattagtgtccatattgatgaacagtgaccaatcattttttcatttttcttaataaaataataacgtggaaaagccacaaaagaaccattagcaacaatagtagatagctctatgatatctttatggtagattggttcatctaaatgaatcgcttgtttggcaacaacccaaccatattgattcatcattgcctcattccatagtcctatttctttagcatttatggttgctatttcagcaaatctatttaacaaatgacataattgatattgtcccatataatcaacatcacatatttctatttgttttgtttcataagtcatcaaatctttcattattttcacatcctcgctagctattatatactaattcactgagaatttcacatattttcatttttttctatgcgaaaaggaaaaatatatgtataataataacatatgaaaggaagtttaaatctatgcaaaaagttattttatcaatattttcatttcttttattgattgtcattctttggttcacttatacaactgccaatatttttgtaacaatttatcgttgtaaaaaacttgatcattcattaagtttttgttttaatatcacaggtaaaattgtttatagtcttttacttatcgtttatgttgttggatttattggtggtattattgccatgatctacggattacttaatgatagtattaacttctatcgtaatggtttaaatattgctgcatttgtaagtgttgtctttgcttattttggttctactattgttatgattggtagaaaaaatatgatggtaggaagaatgatgattgattatcgaaaattaaagaaagttaattttacctataacaataaaatgtcgtttgtctatgcacaaaaagattatagtttctctactcgttttgtagataagacacaactaagaaaaatcatttctaaataaaaagccacaagtggctttttaattttgacttaaatcaaattgactataatacaaatgatgatagaagccttttttagctaataattcctcatgacgtccttgttcaataatttgtccatgattcataacgagaatttgatcagccttttgaattgtagataaacgatgagcaacaataaatgttgttctaccttgcatcatttgatcaaatgcatcttgaatttgtctttccgtacgtgtatcaattgaagatgttgcttcatccaatataagcattggtggtttaacaagcataatacgggcaatacataatagctgacgttgtccttgggaaagatttccaccatcttcactaacaagcgtatcatatccatctttcaattgcataataaatttatgtgcatgagcatttttagctgcttcaataatatcttcatcactagcattttcacaaccataggcaatattttctttaatcgttccagaaaagagccaagaatcttgtaaaaccattccataaagacttcttacatattctctttccatatctaaagtattaaccccatcaatcataattcgcccagcttttgggtcataaaaacgcattaatagattaattaatgttgtttttccacatccggtaggaccaacaattgctatggtttgtcctggttttgcttcaacatttaaattctcaatcaaagtttgattttcttcataagcaaaagatagattttgtatttgtacatgtccttgaacatcttgaattgtttgtggctgctcaataatgttctcacttggtgtatctaaaagtttaaagactcttgcagcactcgcaaatgctgtttgcaattcggtaaaaacattggaaatttcattgaatggtttggtatactgattcgcatagcttaagaaactagataaagccccaacactcatatttcccataaccacatataaagatccggcaatacaaacacttgcataaacaatgttattgacaactctagtactaggattcgctaatgcacctaagaattgcgacttgactccactaacataaactctttgattgatttcttcaaaacgttgttgattttcttcttcatatccaaaagctttaacaactttctgttgcccaatcatttcttcaacatatccacctaattcaccacgtaaagccaattgttcttgaaaatatttatatgtcttatttgctataatcgtcgcaacaacaagtgataaaggcgttaaaacaataacaatcaaagcaatgggaacactaatataaagcataaaagcaattgttccaataattgttgctataccactaaataaatgagtaaacccctgtaataacccatcaccaattaaatcaatatcattaaccatacgactcaataaatccccatgtgaatgtccatcaatataacttaatgataaagtcgaatacttcataaacaattgattacgtaaatccttagtaatcgaataagtcattgtattcgataatcgcataactagccaatcaaagacttcagcaatacaaacacttcctataattaaaaacatctttctaaacaattgatcaaaatcaacaagtcctttaccaataatatgatccactgcctgtccaattaacactggagttaataaagtaaaaataatctggcatgctgaacaaaacaatgctaaatataaatacttcatatatggtcgacaaaataacaacaatctttttattgttttcgtatccattatgccacctccccagataattgagattttgtaatttctcgataaacaacacaatctctcattaattcatcatgtttacctataccaacaagttcgccatggcttaaaaccaatatcttatcagcatgcattatactacttaccctctgtgagacaataaatgttgtttgaggtaatgtctttaatgtctttcttaaagctgcatcagttgcaaaatccaaagcactggcactatcatctaagattaataattctggatttttaactaacgctcttgcgattgttaatctctgtctttgtcccccagataaattctttccaccttgatgaataggactataaataccttcatccatttctttaacaaagcttgcttgagcaagttctaaagcatgttcaacttcttcatccgttgcatcctttttaccccaacaaatattatctttaattgttccagtaaataaaatagcttcttgaggaacaattccaatcatttgtctaagtgatgataaatcatatttttgaataggtacatttttaattaagatttgtcctgaagttgcttcataaaaacgtggtaataaattgattaaggttgtttttcctgaaccagttcctccaataattccaactgtttctcccgcttcaacagaaaaagtgatatcctttaaagctatacttttttgataagaaaaactcacatcttcaaaacgtataaatgtttcctgactatccataacctttaattcaccagaatgaatatgtggttcaattgctaagacttctttgacacgtttataactagcacttgccttattgaaaatcacaataacattcgcaaaaacaaacatcgaaagaagaatttgattcatataattaattaatgcaataacttcaccttgactgagacttcctacattaaccttcaatccaccaacatataaaattaaaataatggcacaattcacaataatacttgtacaaggatttaacaaagcagaaattttacctaccttgatttgcatatctttttgtttttgagtagcctgtgaaaaacgttctctttcttgtatttgtttagaaaaagcccgaataacacgaataccagataaattttctcgacaaacaagtgatacataatccaattgtttttggatacgcatatatagcggcaaagaatgtgacatgactaaataaatagataatgctaataaaggtgcactcactaagaaaatcaaagccatctgcacattgatgcgaaaagccatcaacaatgaaccaataatcaaaaaaggagatcttgaaacaagacgaatagccattgctacagcaacttgtaattgattcacgtcattcgtcatacgtgttatcaatgatggagtcccaatatcatcaatattctcataatcataagcattaatcgctttaaacatgtcatttcttaaatatgttccaaaaccttgtgatgttttagaagcaaaatattgacagacaagtgcacaactataacctattaaggctaataaaaaaagcacaactcccatctttaaaatataatccttattggcttttgctatcccattatcaataatatcagcaacaaccaaaggcacaattaattcaaaaaaagcttcaatcattttaaaaataaaacctgtcatcgcttgtattcgatatggttttatatatttcatccacatacaattcaccctctcttgtcttattataatggaaatgctattatatgtataatatatatattatatgctttttatacttttaacatataggagatacttatggatattaaacaaatgatttattttaaaacaattgtagaagcaggaacgatttctaaagcagctcaggttttacatatggcacaacctcctttatctatgcaattaaaacagctagaagatgaactaggtgttcaattattaaaaagaggacatcgaaagattgaattaaccaaagccggtcgtctcttttacaaaagaagtttacaaatcatttctttatcagaaattacccttcatgaaatgaaagaaacccaaaatgaaactttacgtattggtattacttcttctaattcagcattgattaaaaaaactcaggatttttttaatcaatatccaacattatcttttcgtatttatgaaggaacaacctatgaaatgattgatttacttctttctcataacattgatttaggaatagtgagaactccctttgatcaaagtcaagtcaatgcttattccttagaacctgagccaatggttgctgttggaacaaaagaatacttaactcctgatatgacttcaatagaaaattataaagatattcctttaatcattcatcaaagatatctgccccttattagtgattattgcctaaatttacgttttaatcccttagtaaaaatgattagtgatgattgtcgaacatctttaatctgggcaagtagtggtctaggggttgcaattgtgccaaccagcgcccttttattaattcaaaatacttcacttatacaagttcccttacaagacgaaggactattgacaagtgtaacattcattacccgtaaagatgaagcaattcttttaaaagttaaacaatttattcaatccttttgtcaaaaaatgttataataatcacaaggaggctgagaatatgatagttaatgatcgtttttttaaatttgaaatgttaattttggctattcttagtcaacacgatgcatctagtgaagaattacttgcttctttacaatcacaaaatattttaaatatcaaagaaggtcaacttttaacttctttatatttttttcttgaatcgcatttaatttctaaatatgacatgtatgatgatatttattatcatattgaaaaatctggtttagtgcgcttagacacattaaaacgtcaataccagcaaaccacagaagctattggggtgatcttaaatcatgaaaaataaacattttacaaataaagaaacaaaaaaatattatcaacaaattcatcggtgttttccattgtttggtaaagaagaaaaaagattcttacaatattttaaagaatctctacaatataatgaaaaaaaacatcctgaactaacttatcaacaatatattgaatattttggaagtcctgaagaagttgtttccgcattttatgaacatattgaaagtgaatatattatttcgcatatgaaaataagaaaattcttaaaatatggaagtcttacactcatttgtatcactattatttttggtacgattttgatatacacatcatataaagcttatcaagctttacaaaatgaagatatttattattatgaagaagtcattgaagaactttcttaaagaatctttaatgatttttttaatttaaaaagatagccaagctatcttataaatgatctctcatttgtttatcaagatcaacattcggtaaagtaaaacctctacctttaacactatgtatttcactaccaataataaatgcagttggatcaatctccataacaacatcatttattttagcatattcacgattattaagtacacataaaacagctttttgttgttgatggaaataaccagttgtgacattaacaaatgtacagccacgatcaatttccttaaaaattgcttcagcaatttcttcatgttttgaagatataaccagaacctgtaagttcttttcacccatgacaataacacgatctaaaacaaatgttgaaataaagactgtgataatcccatataaaattccttcaaaactagaaaagaaaacttgtccaactaaaataatcgtatctaagacattaatagccaaagcaactgaaatacctgtctttttattaaagatgattggtggaacatccattcctcctgtactatatcctaatctaaagacaatacctaatcctacaccagtaaatatcccagcataaatggcacaaagtaagacatcacttgttaaatgttgtaattgaggaatagattcaaatagcgctaaaaagaacggaaagataaatgaacttaagactgtcccagctgcaaatttcttacccaaagtaaagaatccaagaaccaacataaccatattaataccaaagacaatcgaagcataattcaccggaataaaatgacctataattaacgacaaaccagtagctccaccaacaattaagcttgaagggacagcaaaaactgcgactccaaaagcaagaattgcattacctagaacaacgagaacagtatctctcaaaactctttttacactatgcattttcctcctcctttacaattgattttaaatacgcataaatacaatcgtctaaatctccatccaaaattgctttaggattattagactcataaccactacggttatctttaaccattgaataaggatgtaatacataagaacgtatttgactaccccattcaattgctttttgttcacctttaatatcacttaatttagatgcttgttcctctaacattaattgatacaacttcgtttttaacataatcaatgcttgttcacggttttgaatttgtgaacgttgtgattgacaagtcacaacaatatttgttggaatatgagtcatacgaatagctgaatctgtcttattgatatgttgaccaccagcccctgatgcacgatatgtatcaatacgcacatcattcatatccaaatcaatttcaatatcattatcaaactctggcataacatccactgaagcaaatgaagtatgtcgacgtttagaagaatcaaatggcgagattcgtaccaaacgatgaacacctttttcagcctttaaatgtccataagcattatatccaacaaaacgcattgtcactgactttaatcctgcttcttcaccatctaaataatctaaaacttctactttccaaccttttttatcaccatatctttgatacatacgcatcagcattgatgcccaatcttgtgattctgttcccccagctccagggtgaatctcaataatcgcattatgatgatcatactctccagaaaataataaagtcttttcaaaatcatttaattcagcttcaaattttgcataatccaaatccaatgcttctttaaattcatcatcttctgtttctttcacatattcatatgtttcttctaaatcatttaaagatgatatcaaataatcataaacatctgtacttttcttcatttcatttaactgatcataaatctttttagcatgttcttgatcatcccaaaaatgttcatccattgtttgaactgttaaaccttcaatttctctttttaaaccttcaatatcaatagaaataaataactctgctagtaaagaacgggctttttcaagcccattcttaatttcatatagttccattaatcagccttaaactctaattcaatttggactgctggaatttgttgttcttgttcactaccaggagcaattcccatatgaacaatatttctagcgatatcttgagaaattgattttgtcatttcttcgaacatatagaaaccttcttctgtatattcttgtaatggatctttttgagcataagctcttaaataaataccatttcttaatttttgcatagcatcaatatgattaatccatgtatgatcaataacacctaataagacacgtctttcataatctaatttgatttcaggtggtaaatctttgttaaatctgttttgatattgtaaataaacaacttcagttaaactcttaacaagtttttgtggatcattttctacttcttctttatgtttagcttttagcgttgctaataacatatagtttttagaaatatatttcattgcaccatcaacatcaacaacagcatttttaccatcttgttttgtaaagctacgaattgtatattcaacagattgttcaaacattcctttaacaatatcacctaaatcttcttgagacataatatcatcacgttctttatacatgatttcacgttgttgtctcatgatatcatcatattgaagtaattgtttacgaatatcaaagttttgaccttcaacacgtttttgtgcaccctcaattgattttgtaaccatcttactttcaatcgcttcatcttctaagaagcttccagtaaattgttgaatcttttcactagcaaatctttgcatcaaatcatcttcaaaagaaacaaagaataatgaacatccaggatctccttgacgaccagaacgtcctcttaactgattatcaatacgtctagattcatgtctttcactaccaataaccattaaaccaccaatttcagcaacaccttcacctaatttaatgtcagttccacgtcctgccatgttagtcgcaattgttacagcacccataacccctgctttttcaataatcaatgcttctttagcatggttcttagcatttaagacattatgtttaataccacgtttatttaacattctacttaataattcagaagtttctactgaaaccgtaccaagtaagattggttgaccataattatgtcttttttctacttcatcacaaatagccttatattttgctttttgtgtagcgaaaaccaaatcaggtttgtcatcacgaataactggtctatttgtaggaatttcaataacacgcatgttatagatttgtctaaattcttcttcttctgttttagcagttcctgtcatacctgctaatttattaaataaacggaagaagttttggtatgtgatggttgctagagtaacagtttcttctttaattggaacaccttccttagcttcaatcgcttgatgtaatccatcactataagcacgtcctggcataacacgtccagtaaattggtcaataatcataatactcgcattacgaatatcacgacttccatcttcagttgctatcatatattctacatcacgagtcattgtatagttggcttttaatgcctgattaatatgatgaactaaagctgtattttcaggatcataaagattagcaatcttaaaatatttttcagcttttgtaataccacttgctgttaaagcaactgtcttactttcaatatcaacttcataatcattcttatattctttaccttcatcagcttcactaatattaggattttcagcttgtaaagatttaacaaacttatcagcttgtacatataaagcagcagtattcttcttaccaccagaaataattaaaggtgttcttgattcatcaattaagatcgagtcaacttcatcgaccaaagcataatttaaaggtcttaaaaccttatcctctaatcttgtcaccatattatctcttaaataatcaaaccctaattcagcattagttgtataagtgacatcacaaccatgttgattacgtttttcttccttagataattcacgtttattcaatccaacagttaatcctaaaaattctaaaactttaccattatctgttttatcacgttcagctaaataatcattaactgtaacaacatgaactccttttccttcaattgcattcaaataaactggaaatatagaagttaaagtcttaccttcaccagttttcatttcagcaatatccccattgtgtaaagaaatagctcccattaattggactttaaatgcttttaatcctaattttctaaaagctgcttcccttactgttgcaaaagcttccactaatatatcatctaagcttgctccttgttgaattctttctctaaagatttcagtttgatgcgctaattcctcatcactcatagcttgatattgaggttctaaatccataatttgtaatgcttgtttttcaagtttctttaaaatcttattatcttgagaaaaagctttcttaatagaaccaatcaatcctcttttttctttttgaggtgttgtattaaattcaattggtgcagaaggtttcttgacaacatcatcaaatgtttcaatttcaatatcttcgcctaaatcatcacttaaatcaacaacttcaatatccggattaagccctaattcctctagttcttttgcttctttctttttaatttgttttctaatttcttgctttttacttgccatgaacaaatctccttccatgcatactaaaacattttcattatagcatataatctaaagaaaacaaagaaatatcaagtaaaatacatgttaaattctcgaaaatatatttcttcactgaaagtaaaaatatgatgcttacgcaccatatctctcactttaaatcttcacaacatgctttgcttgtagtcctcggtcactttgataaagctcgaattctactaattcaccttcatttaaagatttatatccatcttgttcgatttgactataatgtacaaagacatcttttccttctcctctatcaatgaatccaaaacctttttcagcgttaaaccattttactttaccttgcataataacaactcctttacttcatggtcacctctattatatgtatccatttataaataattcatcataatatgtcgacccatctttttatttttatatttatatattttataataagaactctgtcaagggctgtctattgcctgggaaatatgtcaaagcttgaaactaaattacctcactctttttccattttgatgataaatatcttcaaaataagtaaacccatctttttcatcttgttcaaaatatccaatgatatccttggttgtatcaatatcaatttgtttttgtttcaatatctgataagcatcctttgtcttttcaccaattgatacccctgattcaatcggatatacatttccatcataaaagtgaaagataaactgtgttacataaatacgccatagtccagatgctcctccacccattgtggaaaatacaagtttaatttctactttttctaactcactatattgataattcttgtttctttgttttgtttgtctcaacatcatccctaagaatattgaagtagagctttgaaattgacgactacaaatagaaatactttgatcagttaattctatataatcctgttttattgtaaatagatataaaatcataaagaaaataataaagcagactgtgattgctataatatatgattgaatgctaggagtaaaagatggcataaaatcaactttattaacatcatttatataacgaaactctcgagaaacacctaacacaaacaatattcctgttaagacacttgcaataatcataaaaataactcctgttataaaatcccttggcatctctcttgtccctataacaactgtttttgaaggttttaaatattcaacgattttatttaatcctgaaaccatttgtttttgattaatattttcttcactaataatcttttcatctatcatagcatctaataaaggaatatctttttccttaagattttcacatacactttgaacatattctaaagaatgaatttttgagcttaatgattggatatgtttttctaatacttcctgaaaattttgagaatcattaagtatactttgaatatcttcaataggtatttgcagttctcttaaaaatctaattctttttagatttaatatatcctggtttgaataatttcgataaccattttcatctctttggggatgaatcaatcccatcttttcatagtatcttaatgcatacgatgtcatgtctaacaattcttctacttctttaatttgcataaatatcatctcctttattcaaacataatccttagactaagtataaggtcaagataaaatattaatttagcttcatattctttttatatctagcacttacccagcctttttgatacggagattcttcaagttcaatatccaaaatccgcttatctaccatctcatttaaaataacttgtaacattgttataaatggtaaatgacagcgatcacaaatatcccgtgcatctaaatattcttcatctatgactgacaaaaccaaatgaaaataatcactataagatttattcacaattaccccattttctagcaatcttatatcactatttattttaacttgcttttcccattcttctcttaattcttgtttttttaattccgttaacaaatgatattcaagatcatagagattatctaatttttcacaaaattctactttatcataaattgtttgattataataatcttcattttgacatggtggaatagacactacatatatgtccttatcactataatgactgacaagatataatagatttatataatcatctggacatcttagtgaagcccaaattcttattttatgaaatttctgtatactttgttcaaatttttttatatcttcatatgcaaagtctttataatcctcatcgcaatattttgtatccatatcatacactttacgtctctgtaaacttgataaccctaaagatatatcacctaaataaaggttaaaattaaatgacaaataattaagttttattcgattcattctcaaatcaccaatacaaacatcaccaaatagaatatcgactatatcatcattatccataaataactcctttaaaatgaattcattaattttattctatcattttaaaataggatgtctagggagaaagttctccttagacaaactttaatccttcttcatcttgtttagttgataaaacaagaaattctaccttttgtggtgcatactttaaaactaaattcaaacaagttaaaagtgttgagcctgatgtgacgacatcatcaagtatcaatacctttttccctcttaacatttctccatctcttatatttattttttgatgaacttgttgtctttcttgatacgataaatcactttgtttatacttttgagttttatatagaccagtaaaaacttgatgtgaaaaagtttgtgcaatggtttctatcggtgaaaaaccacgtttctgattatcttcttttgagctaggggctacaacgattacataatttcgatatttttgttcaagctcttgtcgatataaacatagaaaagcatctttcaaagcatagtcatatagacctttgtattgaaataacaagcctctaaaaaattcattataatgatagagaatacgcattgggtaatgatgaaatgcaatgttaaggtcaatgatttcaaatttttgaaggcattcataacatagtggtaaaggatgtaataaagcaaacaacgatatatttgttaaaggagcttttgaacaaattaagcatctatggaatttagtttcttgatgttttgaatacattgttgtatacctttggttctgccacttgctaaaatataaacctttccactaggatgattgggtttacgcccaactcgccctgcaatttgagtaagagttcgctcatcaaaaatgcttttttctccttgataaacaataacctgaacatcctcaatagtaattcctctttccaaaagtgttgttgatacaataacatctaattgattatctttgaatctttggatagtttcctgattattcatatgttgagatgacacaccagccactttaaaggaggaggctaaatatgttaccatcttatgaacacacgctatacttgagacataaatgatgactttcttttggaggtgagaaatcaaccatttacaaacgataccttgaaatattgtcggaataatcaaaagtttaggaactggcaaatcatgaccatgataacgacgattcatgattagcacttcatcttgattatctttaagcaatggtatagttgcactcaattttacatatcgaccaatacaacagcgattaaacatttcatttaacacatcattaccataataaggaaaagcatccacttcatcagcaatcatcaattgaaatccaatttgattttcaaaacgatataactgatgcattgtacaaacaataaaatttgaatcagcattttctatatgtccaccatagagtaaaccaattgtgacattacagaaagcttctttcaatctttgataaagctcaatcacaagttctttgcgtggaacacaataacaaactcgatgtccctgattcaaggcataacaaatcaattcaaagacaacttctgtctttccagaaccacaaacagctaagactaatgaattcaaattattttggtaattttctaataatcttaaagagattttttgctgacttggtgataactgaaaattcaaagcataagagataggtttatgaaaaagaaattcttttgattctgtttgcctttcttcattgacaaagactctgtgaaatggaatacattgacgacaatagtattgcccatcaatttgataaaacatttgtgcatcttgattatgacatctaggacattgcatcttcatcacccaaattcatcataacacacatttaccccttgtgggtctcaacttgatgacaaatttgcctcttgattttctcaagattttatctttattattgcaaaaaacattgataaaaacacaactttttataaacctatgaaaaagtagtgaaaccaaaatgagaataccataagaatttcatgagaattgaaaatggatttaaacatattttttatttaatttcatagaatatatggggtgaaaataatgagtggaatcgtaacgatttgtaattatcaaaagaatttattgaaatacgatgaaaagttaaaaaggatgactgaattaatagaaaaacgtggtcctgatcatgaaggatattttatgacacctcattgtttgatgagtcataaaagattatctgtcatagatattaaaaatggaaatcaaccaatgttatatacttatcatgataagatttatcgtattgtttatcatggtgaaatctacaatatgattgatttaaaaaatcatttcattgaacttggttatacttttgaaacaaatagtgatgctgaagttattcttgttagctatattgaatatcaagaacattgtttagatttatttgaaggtggttttgcttttgtaattgatgatggagaaaaattatttattgcaagagatcaattaggtattaaaccactttattattatatggatgaagatcagactttagttattgcaagtgaagtgaaatgcatattaacttatattggtaaagccattgtagataaaaatggtatcaaagaattacttggactaggtcctagtcttacaccagggtatacaatttataaaggaatttattctttgcgaccaggttattacatgtattatgatggtgagtgtcagaaaaactgttactggaaagtccatgatgaaccacatactgaagatttagctgaaacaattgaacatgtgaaaagcttggttgtagaaagtgttcaacaacaattaattggtgatgtgcctatatcaaccatgttatcaggtggactagattcaagcattattactgcacttacaagtcaatatatccatccactaacgacttatagtattacctatgaagatcaggataaatattttcaagcctatgattatcaaacaacaatggatgatgattatattcaagaaatgttatcacgttatccaacctatcatcacaagataattttaaaacaagaggatttacttaatgctttagaagaatcattgattgctagagatatgcctggtatggcggatattgattcaagttttctattatttgctaaagagatttctaaaaatcataaggtttcgttatctggtgaatgtgctgatgaaatttttggtggttatccttggttttataaggaagaactttacacacagccctatttcccttggatgcgtgatttagatcaaaagattgatttatttaatgataaagtcaaagctttagatttagaacattatattaaacaaagatatcaagaatctcttttagaaattcctacaactgatacaaaaaaacaaatgatttatttaaatattcaatggtttatgcaaaccttacttgctcgtgctgatagtcaaactatgcgttcttctttagaagtaagagtgccttttgctacagttaaaatattgcaatatctctacaacatgcctaaagaatttatgttctataaaggtgaagaaaaaggtatcttacgtgctgcttttgaagatattttacctgatgatattgcccatcgtaagaaaaacccatatccaaaaacacattctccaatctattgtgatattatttatgaaaaattaaaagaatcactgagtgatccttctaatattctttatcaattctttgataaagataaacttatccattttgttgaaagtaaaggaaagagttttactgccccttggtttggacaattaatgatggggcctcaattaatggcttacttttatcaaatctatttatggggtaaaatctatcatattgaattagatttttaaggacaagatttcttgtccttttaccatgcccgatgtggatatccttttccatcgtaatagtaatatctttgatgagtagattcatacttatctaaaacattcttacctagatcaggataatttgtaataataccagaaactcccatatctaaatactgcttcatcttcttagaactatcaactgtccaaatataaataggaatgacatgagagacagctttttgaataaaagatgtacttgctcggttttgttcaattgctagaaaatcaatatctctttgtaataaagaactatcaatatctccaacactcccataaatacaatagccaacccaccattctggtcttttttgggttaaatccttaacactttcataatccaaagacataaaaattgcttgtgaagaaaaatgctgtctttcaataacttgaatgactttttcaaccatttctagtctatttgatgaagttggttttaattcaattagcaagcctatcttcattttttcttctttcattttcttaatcagattttctaatgtcataatataagaagtatgatgatgatttgttaattttacattttctaattgaacagcagttaaatcttcaacactttcatttcgatttgataaacgggaaagattattatcatggaaaactatcggaatcccatcttgtgataattgaatatctatctcagcataatctatccctgtatcattagcatctttcactgcctcataactgttttcaacataatatcctgaaccacgatgcccaataacccaaggtctatgaataagggaatcttgttgtaaataaatagaaacaagacatataataagtgtgataatgataaactgacttattcgtttatgattacgatatatacctaaatcagttaaacgtttttttatattttcagtcatttgttgtaatgattgtctaaaatttaaaagtaactcattcatataatccgtattaattggcaacatgtctatagtaatgatatctttttcatactctaacataactttgataagatattgaataaagaatatcattcctccaacattaattaaatataataatatatattggataacactataacgaaatgattcaaaattgataacatatttaagaaaataaatattaaagtcacgattatgcaatattggatatggcaagatattcatgattaaatattcaataatcatccaacaagctatcaatgataaaagttttatttttgtttttatatctatctttttgattaaacatacactttcttgtattgctttaataatatgacattgttttagaattatatatagtggaacaaataacatacacaaataaagtgaataataaagaaaatatattagacatattaggaaatatcctatcattgttaattttaattctccaaatataaaaggtgggatatcccagcgaggaacataactatttaaataaccaatatgaaccaaaggtaacaataaaacaatataaatacctgttaacaatattgttggtttatggatatttcttaagttttgaaaactttttaaaataatattttttaaaggataagctgaatctttttttctaatcacaataatttgtatcacaacatataactcataataaataatgagaatcattgttataaacaataataaaaaaataattattccagaaatagaaataaaatcaaaaacaatatcttgattaaatgctattccatcagattttttctttaaatattcttttaaaatctttcttagtaagggactaaaacaaaacaaaataagaattttataaaaaaactcaaattttaaaacatctttacatacttgatagcattttaaattcttcatttttcccctccttttccctatctaaccaccacttcaaaaaagtgtcaagaaaaaagatgagtttcctcatcctatcagtcaaatgaatctattgatttataaaaatgtttataaataagataagttcctatcatacagaataatgcataataaaattcaggataacataattgtacactaaaattaaaatcaaaatgaccagtaattgttagaatatgccaagtaaaaaattcataaatttccattgtcataattcctaataatcctattgttccaataatttcactatttttaccaaaatttgtccatatacctacaaaagctaatataatacatgttaatgcaatgggattatttaaaagtgtaacaccatatattgtttcaatacctttttgtcctccaaaccaaggaaaagccatcattgataaactaataagtaaggttattgtcattactattttttctttcatatacatcccccttttcttcttagattatacgtttcatcttttaaataatttctaattctcacttaaaaatttcttaatattttattaagatgacttgtcaacagaaaaaagaaacccaacatataggtttcttttcaaataccaattaagataatatttctaaaacatcttcttcatcttcaacatcaaaaatcttgattgtcaattggtctaatttgtcctctggactgacttctatctgcatcaccaattcttttgatacatgtcctagtttctgttttaacaatttgataagcaatactattttctctttcatcatcccttgcaattcaccttgcttgataccttgcttcattccttgtagctctctttctcttgcataactgtcaatcacttcacacatcttgatctcctcactttcttctttctctaatctgataaccaattcttcactattggtcattattgctactacaatcgcttcatctttacttaataccagatcattcaagctttctttatcccgatcccattgatagattctctggacaccttcaatgactgctttaacctttggattctttaaccattcaaccctgatatccttgatatcatagatattcccattccagttattcacccatcctttcaaggcttctggtatttccatccgttctatcagtgaatatggctgatgccacagcttatctccactatataaaacaagtgtcaagacgggaatgggatgaaatgatttacgcttgtcctcatcctgaaggttgaactgctgctgatatgtaatcgtatcgtaatccatgacacgaaaaggcatagaatagtcaaccgttgactgattctccagacccagcagaatcgctaccccattgactgtacacttcatcagaacatccctttgcttaccaacgccaatcacctcatcatcaaactcaaaatgagtcgttgcattggcatcacataagacaagactgttttcatcaatgagtgcccttccctgaaaaagcatagcattcatcaaatccataaagttttcaacttttttaaagaaatccttgtaaatcagatcaggcttagaaatcagttttgtttgtttttgaataagtaaactcataattatttttcctcctttttatagttgaaaaacactgaggaaatataaatccctatacttatatatacgcttgcaaagtctgatttttcttcttttttcctaaaaaaagttaaaaaacttttcattcacccatattatagcacaaagcaaacttttatcaattgcttaaagttaattcaatgcttttataaaaaaaaagcaagatcatgatagaccttgctctctttttaatctttcttgtttatctttttgagttttgatgactttttgacgtgagaattcttctctatctttttcatctaatgcttcactaataaacttaacagttctttcaaattcaggaatagaaatatttttaagggcatttgctctcttttgtgttttacgaattgcattggctaaacgatacacagcattttctatttcagcaagtttaacagttaattctttaacatggtagaagcatcgataagcatagtcaaccttggagtttgctctttcaaaaccataacctaaacgaaggggtgttttttcgtaagtgactttaggaatttccactcccataacacttcgataagtgacactaattccttcatcaataggaacagcttctacaatatcactgataatccctaaagacatatttgcttcttgtagtgcataatatgctttttgataagaatcagtgatgtcatctctaatcatcttgacatcgtctaataaactcatcatttccttgattagaacatttcttttcttatccattaagtcatatcctagataggcaagttctagtgactttttggttgcaattaaattccctttagtaggaaaaacttgattagccattattaactgcgtcttgtagctctttaatcattgaatcttcttggagaccaaattgagctacagccttttcatgatcatagaattgttctaatacagcattatcaatacggtctaattcacccttaggaagaactgataataatgtccatcctaaatcaagtgtttcttcaatagatctatttgtattaaacccttggttaaggaaatatctttcaaataaacgtccaaattccatataagttttatcaactgctgataattcatcttcaccaataactgaagtcaatgatttaacatcttgtacatgcgcataagctgcgaacaattggttagatacagctgaatggtcagctcttgtataaccttcaccaataccatctttcatcaaacgtgatagtgatggaagaacactaactggtggataaatacccattgcattcaattcagaatcaagtgtaatttgtccttcagtaatatatccagttaagtcaggaactgggtgagtaatgtcattgttaggcattgttaaaattggaatttgtgttactgatccttttgcagatttcgcaataccagctctttcatataatgaagctaagtcagaatataagtatcctggataacctttacgtccaggaatttcacctttacttgatgagaattcacgtaaagcttcacaataagaagtgacatcagtataaacaaccaaaacatgcatatcatgttcatatgctaaatattcagcagctgttaatgcacatctaggtgttaaagtacgttcgatgattgggtcatttgataagttcaagaacataacaaccctttgcataacaccagcttcttcaaatgaacgtctgaaatattcagcaacgtcatttgtaacccccattgccgcaaagacaacagcgaatcctgttccatcgtcatcagcaacttttgcttgtttaacgatttgtacagctaattgattatgtggtaaaccagatccagagaagattggtaatttttgtccacgaatcaatgttgttaaacagtcaatagatgaaatcccagtattgatatagtttcttggatatacacgagcaactggatttaatggttgaccattaatatccattgatttctcagcataaatttcacctaatccatcaattggttttccagcacctgagaacacacgtcccaagatttctttagatactggtaattccattggatgacctaataatctagtttttgtattggcaagagataaagagtttgttccttcaaaaacctgaacaacaactctttctccttcaatttgaacaatacgtcctaaacgagttgaaccatctttacattgtaattcgaccatttcgtcatatgaagcatccttaacatgatctaatacgactaatgaaccgttaatttcattcaaccctacatattgaagactcataacttattcctcctttagtctatagatgcaacagcttcatcgatttctttataataatcatcaaataaagctaaattattgttaggaacatcatatttcattttgataactctatcaaaaatacctgtttccaaaattaaacgaattggttttccagcattcacaacttctttaccacgtttatacaagtataagataacttccatcatctttaattgtttttcaagtggtacataagtatcatcaggatggaaagcattttgttgtaaatatccaacacggactaattttgcaacttcaataattaatttttgatcatcaggtaaaacgtcagatcccattaatttaacgatttccattaattttgtttcttctgcaagaatacttgctaattcttgacgatctcttaagaatttaggatcaacatttttattaaaccatctttcaagatcaggaatatattcactataactttgattccagttaattgcaaaatagtgacgtgcataagctaaagctttatccaaagcccagaatgtacgaacgaaacgttttgtattttgagttactggttcagagaagtcagatccttgaggagaaactgctccgataattgtaacagaaccttttgttccatttaagttattcatatatccagcacgttcatagaattgagataaacgtgatggtaaataagcagggaaaccttcttcagctggcatttcttccaaacgtccagagatttcacgcaatgcttctgcccaacgtgaagttgagtcagccataatcgcaacatggtaacccatatcacgataatactcagcaagtgtaacacctgtataaatagaagcttcacgagccgcaactggcatgttagaagtgttagcaattaagacagttctatcagttaaaggtttatttgacttagggtcaattaattctctaaattcttcaagaacttgagtcatttcgttaccacgttctccacaaccaacataaacgataatatcagcatcacaccattttgcaagttggtgttgagtcattgtttttccagtaccgaatccaccagggatagcagctgttccccctttagcaattgggaacaatgtatcaataacacgttgaccagtaatcagtggcatagaaattggtaaacgttttgtaacaggtctagcttgtttaattggccatttttgtgttaatgtacattcaacaattttcccatcttcagtttcaattttcataaccacatcatcaattttatattgaccatttggtgcaacttcaataacttttccttttgtatatggtgaaaccatacacttatgagtaattaaatcagtttcagggatagtggcataaatatctccacctttcacttgatcaccaactttagcaaccattgtgacatcccataatttttccttatcaagtgggtctacatgactacccgtaggaataaatgatccagattgtttagctatttcttctaggggtctttcaatcccatcaaaaatatttcttagaataccaggaccaagagttacagaaataggttgacctgtaccaaaaacaggttctcctggttttaatcctgttgtcgtttcataaacttgaattgttgtggcttctttcttaatggaaataacttcaccaattaatcttgcatgaccaacataaaccatttctagcattgaaaaggcatcagtatcttttactgtaacaacgggcccattgattgaataaattacattttcattcacacttttacccccttgtttttatctaataattaatccagagtttttattaaaccattctttttgattatttaaagcaaaatctaatgtttcatcaactactaaagaagattccttattttcaataataaatccacctattgtaatatcatcactagcttcaacattaatatcttgaccaaaagctttcactaaatcagctttcatggctaaatctttagcagatacatacataattgaatgactatccttaaaatcatcagctacttttttaatctttgattccataaaagatgcataatcagcactctttgtaaaagccactaattcttcatgtgccttttcaaaaatagctttaacatattcatctcttttttcaattaatttctttgttctttcaatatgactttcagaaatttcagcagaagcatttgaactcatttcttcttcttcttgtttaagttttaaatcagcatctctttttgcttcagctctcatagactcataagcttcatcttcaagggccttcacttcatcaagaatagctttttcttcattctttgcttgtctttcaatttcatctttcatatagagaaatacttgatcaatattttgcataatctttctctcctatagtttcacaccaattgcttcagatacataaccatcaatcgtctctccaattttagagtttccatgacgatcaggtatctcagtaattaatggtttttgttgttttaatttaatttcagatataatatctggacacatatcgactaattttgtagtgactaagataatcgcaatagatgaatctttcatctttgattgcaatacttcaagaaaatcccttcttgtatgcacgacgacaccttcaatgcctacaagtcttagtcccatcaatgtatcaatattatcgctgattaagaagaacttcatataatcagacctttcttttacaaattataaagcgttgataattaagatagaaattaataacccgtaaatagcaaccccttcacctaaggcaacgaagattaaggctttaccgaagttattgtcattttcagagaaagctccaatagcagcaggagcagcagcagctacggcaataccagcacctaatgcagaacatccagttgataaagcagctgcgatgaatcctaaaccttgagctaatgttccagcaattgaagcatcaccagcggcaaatgcagaacccatagataaacataatgttaaagcaacagcaccaaagaatccaccaacatgagttaataaacgccattttgcactttctttgcttactttagtagtaaacattttcactaatggtaatgataataaaacaacagcaatagcaggtaaaataaacattaataaattcataatataatcctccaaatatatatttttttatctttctttaatagaagtaaaaggttttcctttaccttcataataacgtgagaacatttcatagaactcaagacgtaaaacttgaataccaacaatcataccttccaaacacataacgaagatattaccaagaacagcaactaaaatataaccaaagttaataattccagctccaccagcaaccatttcagctagtgtataaacaaccatcatcattccggcatgtgataaaacgaatccaccaacacgtaaaaatgacattgtattggcaataaatgttaacataacttcaaataattcgaagaatgattcagtaaagaaagctccgaatccatgagggaacatcttttccccttcaagtttataagttaatggttcttttaagaaaatcatcacgactggcattgcaataagtaatgcaatataaactggcccacctaatggaatagggaaatcaaccaacatatttgcaactaataataagactgatacatagaaaacaagtcctgcaacaccattttgagagaacaataaatctccccaatgtttctttttaatatttaatataatattaaatacaatagaaataataattaagacaacccctgttgcaatagccgacatcaataatggcattgtattttcaggtttcattggaaggaacattggttccatgaaatgttcaaacaacgcttcactaccaaagatagaaccaaagacaaatccaaagatcgtacttgaaatacctaaacgcattccaactgccccaagttgcatacctttccatttatagaataaatatccaactaatgataaaacaacaccttgaccaatgtcaccaaacatcataccaaataagaaggtataactgattgcaactaaatttgttgggtcaaaatcagtataagatggaacaccatacatttcaacgaacattctaaatggtcttgagaaccagttgttctttaattttgtaggtggtgttaaacgtgaatctcccattgctggtttgatttctacatgtacatcatctaatgtttcaaaatcagctttgatggcttttgctactttatcttcagcaaatccataaacagcggcattttgtccaaagacaacaacatatttttgagcatcatatgtttcattcaatttcgtagaaactgaataaatatgattcatttcttctaaattttcagcaaacaatttttcaattcttccatcaagaactttcaaataatctcttgctgtatcatcttcttcttttaatacatttaaagcatcttgtggtgttccatgaacgaattcaggaatatggattctttcaaagtataaagatgagaagatattgtcaatttcaggagctttactttgggttgtaatataaccacaataagtatcttttgttcctttatgaagaatcttaaataagaattgttgttctccataatattttaatttatccaaattaacggttggaattctcccaaaacgaacttgtaaatatttacaattaaacaagctatcaaaatcaatatcagcatcaatcatatgtgataattgagaaattgttgattcattttcttcaatcatcgtactcaagtcttctttaaccttttcaatctttgctgcttgttctaatacattacaaaagaatgtatctgcttgaataatgttaattcttgtactgtcaacattttgacattttaaatttaaatgatatttatctcttgcttcttccatacgagcaattaaatcagcatacggattttcacgatttaaaactgataatccttgtacagaatcagcaaattttgaagccggttctggatgaaaatcatcaagattgataagtttcattaacacagcatcatattgagatgctggaaattcaatttccagaagcttcaattttgctattgccataagtttctcccttccttaacgtgttgatctttttttcataattgatttaacgaaaatcaatactaggcaagcaacgattacaatagcaaatggcatgattggcaagttcatatgtgcctcaaatgcacatcccaaataaactaatactgcataaacaacaatcaaaccacaaattcccttcattgagagaactctttcaactgtagaattttgtaaatacatcttcttaaatgcattaatcgtataagttccagcaatcaaaagaacaagaccatcaataattttataaattgttgatagtggcaatgctattgcaggatatagactgattgtatagaatacatctccataaataagtcctcctagcaaggttgctataccaagagaaagaaataatggacccatttttttctttctcataagaagtccaagcaatgctaacacagctccaactcctaaatcccccaaaaagataccaaagacagcatagtataggaatgcaaatgcaattgttgtatcaataacatctgcttgtttcactttactaacagcttcaaatggtttgacaatttttgcattatgcacaacagttggtgcaacaacttgctgatgatctaagatatcagctggtaattgttgatattccatacttgatattgatgagaatctcgctttaaattcatcaacaatacgtgttggaaggaaaccataaattgcacatttactctgataatctacaacaaagactttatatgcttcaattctttgtaagaaagaagcggttgaataaagttttaataaatcaactttgttagtttctcttaaaattgtcattttttgatccatacgcaagatatattcttgcattgcacgaatctcatcatctaattccttcttcgcatcatctaacttaccatgcacaaatgaaggaatttcaatttcttcaaaccctaacgcttggaagatgttatcaacttctaacaataagttattcgttacaatataacaacaccaaacataattgtgatcttcacctaatttattgaatataaatggtcgaccttcataatacttaatcttatcaagattttgtcttttaaagcgtccaaatcttgctttcatatattgactctcagctaattgatctaaattaacttctgataaagtcaaacgatttaacatttctaatgttttttcattttcttctttttcttgaatcaattgatcttgaacatctttaatctttttaatttcttcttccatttctttaagataagcatcattcttatcataatttaaagaatagtcaggagacaaatctcgatttaaatctaactttatatcagatgcaatctgaatcaaacgatctaacatctttgtataaacattgtcttcttgtaaagcatgtacacctttgacgttattgacaatctttgaagcagattgaggataaaagtactttgaatctttaagtttaaataaaacctgatctaaatcttgacgatcaaaagtcatatttaacaataccatttcttctatagccataaaattaccccctaatagattaacatcgattcgatttgactcggtgcctctccatatcttaaaccttcgataatatgtttaagattatcaatttctacttgatatacaattttatacgtcatatataccaaagcactatcagttgaaaaacgcataaaacgtttagctaaatgatatctaattttctctgtataatattctatatagacaaattcatgatcatctacatataacttataaggagattcagcaagcttctttaacaattcacttgcatctttgctttcaatcaattcatccataacacttttaggaatacgactgtattcagtaaaaagggtttctctgatttgatctggtgacgcattaaaatatttctttaaacgatatatctttgtaatattttgtaactctatagaggtattgatcattgttaataaatctttacgtttttttcctttaaacaatttattgactgtatcaacatactctgcgtaataaatatgttttaattctaattctaacatattagaatcaagtggtttatcatcttctggtttaaatttaagtaatgcattataatactttgttcctcttaaaacgattaacaaactatcataatcattaattgctaataaaccatacaaatcaaaacttgcatatttatttaaatagtcggggatttctatttcatatccagtgtaataatctgaatcaattaatcttgcttttgttaaaattaattgtatttctaattctgttacacctaatcgatagaattccaattctttttttgaagcaaatctcattaatcgatctaatcttaagaagatttccttatttaataaagcttctaattgtccacggtgaatattcacttcttttatatcagaaagaatttcactgtaggcagtatcactcttgagataagcgaccaaatcattaatacttcttctttttaatagttcttcgtaattctgctctgttaacctacgtgaatacatagctctcgctttagctagaatcgcatttgatgaaaaagaactcatacgctcacctctcctctaaatttctttacaacgactaacaatggtagaaacccattcatctttattcttctcgtaaagacttgagagttggttcagtgattctttgtactcttgttcatttttggcttttgtttcttgaatctgtgcttctaactcttttttatgagcatcaactttaacttgatattcttttacaaaagagtcatagatttcttttttcttagcactcatactagattgaacatcttgctttttcttgcgtgcttcttcaaccttttgggagcactctaaatctactgcaacaatatcctgaataatcttgtccaaaataatccctcctcactttatcctttattctcaaatagtttactcctattcttttgacatttcaagcaaaatagcattttgttaatgagattaaaatttatccttaattcaccttataaaaaacgcttattttatgctttaaatatcatttttaaagaacattgcaacgataaaataaaataccttttttgccaatatacaaatcatcatttctatcctaaaattagacaaactataaaatttgtctaaaagaaaacatgtgaatctgtatcacatgttcttttcttttggcgctttaaacatcatatagactggaacagccaataaaacacttccacctatgatatttccaattgttgaaagaagcatatgtaaaggcatcaagctccaatcaaccgtattccctaattgagtcatccccattgcaaaaattccaccattcgcaacacagtgttcaaatcctggtaaaacaaatgtcataaccaaaatcataacaataattaatttagctgtatcatccttcactttcacaccagaataagctgcgacacacacaatgaaattacataagattcctctaatcagcaattccacagcattaaaatgaagttttgcttccataattccttttaaataaggtgtcataatcgcctcttgagacccacctttaataaataggaaacaaataaaagcaattcctaccatattaccaatataacaagttatccacattggtaaaatatctctcacctttaattctttttttaatactggcataatagtcacaaaacaatttcctgtaaacaattctgctcctaaataaataatcgcaaccaaaccaattccaaaagttccagctaccgcaatttttccaaccacactatgatcacttaaaagtgctcctaatgtataagataaaatcgctgccaatcctaaataagcacctgccataaatgctcttacaaaaaaacgtaatggatcagttttcattaactgatacttaatcttccctagcttacaaagcatatcaacgtcacttatcataatgtccccctttaaaccacagttattatagcgaaagatgctctatatttcaattatttccaaattttatttgtcttttatgaatttgtatgttattctatacaagaaatcatgacactggttcgagagccaaacccagtataaaaaactaaggacataacgataagatggctctgccatcttttttatgtctggcttctaactgtactttagaaggaggaaacgaaaattgaataaaaaaatgaaagtgcaaattgttattgcaatgggaattgttttaaatgttttaggagcatttattgctatgagtttttccattccattctatatggattccattggaacaatacttgtagcaggattattaggtcctaaatatgccatgttaacaggtgtattaggaagtctaacaagtggaatgacatttgatatgtattctttctattatgcccctgttcaattattaacaggattttttgctggaatactttatcatggtccttggctaaaaggatggaaaacattcatcggttctatcttagtaggtgttccaacatcaattgctagtgcgataattactgcgatgttgtttagaggtatcacttctggttcaagtagtgctatcgttgttgttttaaatcatcttggtcttaatttagtattcagtatatttattgttcagatttttactgattacacagataagttattagctgtcatgttaacaaagatgattattgaaagaggtcatttatatgagaaatgggggattccatggaaagatacaatcgtattaccgacaaaatcaaaagagaaattgtactcttaaaagctaaaccttgtgcttggtctaaatgtacattctgtgattatattgaagataactcaacctgtcttgaagaaatgattcaaataaatgatgaagttttaaatcatgtaacaggagaatatggtgttttagaagtcattgattctgccagtatctttgaattacctcaagagacattagaaaaaatcaaacagattattattaataaacatattcatactttattttttgaaagtcattggatttatcgtcaccgagttcaacaaatgaaagatttctttggtattcaagtcattgttaaaactggtgttgaaacttttgatgatgattttagaaataaagttctaaataaaaatgctaccttccaatcaattgaagaattaaaacaatattttgattctccttgcctgatggttggtatcaaaggacaaacaaaagaaatgattgatcgagatatgtctatcttaaccaatcacttcaatcatggaacgataagtatttatcgtaataattctacaccaattaaacgtgatgatgaattaattcattggtttatgaacaaatatagttatttacaagtagatcctcgttatgatttcttatgtgatcctactgattttggtgttggtgattaaaatatgcacatttaagaattatttcttaagtgtgcttttatttttccttctattcaaataaccaataagataaatcctccgaaatctctaatcctaatttactttgtaaattcaaagaagcgatatttccctcaataacctgacaataaggaatctttcctttttccaaacaatcattaattaaatagctctctaacaatgttccatatcctctttgacgatatttaggtacaacctctaagattcccatactcccttcatcatgcattccaataaaaccagccaaatcattattttcaaacaatccccataattcttgatgattgattttatccataatataatccaaatcatccatctgatgatatgcttgattgacttcttgagcataatcttctgttaataatcgaatgcaaacagaggatggtaattcaatcaccggtttttctttctttaaataaactgcttgataacatccaaattgcaaagtcttaccatactcagcaactaataaatcagctatctctttttgtttaacatcaataagatcatatttcactaaattttctttttcatatattttcacaaatttttctatgtcattcatagaaatcattaaagtttgactacgtctctcgactaaaatcatcccttccttaccctcataaattatttctacatgatttaaacgtaagggttctaacatatctatatcattcacttgattcaacattttttcacctactttttcctattatacaatatttttagaaaagatatgaaatattacaagttttctttccttttaagaaaaaaacttggggtttataacaaattcatatataatgaaaatcgaggtgagcatatgaaactattagcaagtgattttgataatacattatggtttaatgatcatatgaaagaagaagatgtcaaagctatcttagaatttcaaaaacagggaaatctttttggtgtatgtagtggtagatgcttacatgggattgttaatccaagtttaccttatcaccttgatcatgacttttatattttactaagtggtgcccttatattaaataaggataaggaagttatctttgaaagacaaattccactttcactcgttcaagaaatctatgattttgtagaacatattgatatgtcaatagtgtataacgatacaatgtataaaatatatcaggtgaaaaagaatgattatcatggggtagaacttgattcattgagtgaattacaaaccgatatggtgagtgctttctcatttcattatgaattagatcaaattgatcaagctacattaacaacccaaaagatattagctcagtttggtgacgtgattgaagcttatcaaaataatcaacatattgatttagtagctaagggatgttctaaaggacatggtatgcaaattatccaagattattttgatttatcaccaaaagatatctatggaattggtgattcatggaatgatttaccaatgcttgatgcgattgaaaatggttatacttttacttatgctcctaaggaagtaaaaaaacatgcaaaaaaagttgtgacaagtgttgcagaatgtatttatgatataaaaaacataaaataattttgcattttccaaaatatgaatataattatttgattatttcaaaaatatatgattataaatttgacaaatgtatacaaaaatgctattatcaatgcaataacaaaggaggatgtgtctcaatgataaaaactattaacagttccaaaaccataatgtgtttgatatattgttaataggagactgtctttgtttatagttgaaaagcaagaaagcctcattaatagatatgagactttttttattagagggggagtcatatgaaaatcggtgtcgttggtctaggaacagttggttttggtgttgttgaaatcttaacacaacaaaaagaaagactagaaaagcaaattggtgaagaagttactattaaatatggttgttcattagatgaagtgacattacctgaaggtattatttatactcaagattttaatgatgtcattaatgatgatgaagttgatgttgttgtagaattaattggtggaacaactattgctaaaaagattattatagaagctttaaaaaaaggtaaaaatgttgtaacagcaaataaagctttaattgctcatgatggacaagaaatttttgaaacagctgctaagcatcatgctaaattttattatgaagcatcagttggtggtggaatcccagttgttgtcccagcaaaagaagatttgattgctaatgagattgaaaagattgaaggaattttaaatggaacaacaaactttattttaactttaatggaaactgataatcttgattttgatgaagcattaactattgctgatggattaggatatgttgaagctgatgcaagtttggatttagatggtattgatgccgcacataaaattcaaattctggctatgaatgcatttgaaatcttctttgactttgataaaattaaagcaacaggaatccgttcagtcactaaaaaggatatggattatgctaaaaaattaggttatcgtattaaattaattgcacaagctaaaaaaatagaaaatggatatggcattgatgtttctccaactttaattagtctaaaagacatggttgcaaatgtcaatcaagcatataatgtagtagagataacttgtaactatttagaaaatgttcttttctatggaaaaggagcaggacgttatgtcacagcgagtgctgttgtcagtgatatcatgaaaacacatcagcaagatatgtggaaacatgattatcaatatgttgaaaatatttatccaattactaagtctaaatattatgtaagatgtgatcattctttagatattgattatgaaacatatttctcacaagatcatgatcatatctatattacaaatcaaattgagttaaatgatcttcttgaacagttacaaggtgaaacatataacttattcaaagtgaggggttaaaatgaaagttattgtccaaaaatttggtggtacctcaacacgtagtgtagaaacacgtgaacatatgtataaaaatattattcgtgaattagaagctggaaataaagttgttgctgtggtgagtgcaatgggaagatatgatgatccttatgcaactgatactttgctttcaattgtcaatactgatgagttaactgatgaagaaattgatcgtttaacaagtattggtgaaactatttcaacacttgtttgtaaaagtgagttatctaaaatgggatacaatgttgaaactgtaaccaatgtagaacttggaatacaaacagattcacatcatatgaatgctacaattacaacggttgaaggtcatcatattcaagaaaaattaagtcgtgcggatattgtgatttgtcctggttttcaaggttattcacaaaaaggtaaagtcacaacattaggacgtggtggaagtgatttatcagctgttgcaattggggttgccattgatgcgagtgaagttgaaatttatagtgatgtcaatggaatatatacagctgatccaagaatcgttccagatgcgattaaattagattatattagttatgctgaaatgcttgaactttctaaaaacggggctaaggttttaaatcatagatgtgttcagttagcagcaaagcatgatattgttattcatgcaagaagctcgttcgatgcgagtcagggaacatatgtgttaggagatgagagaatcatgaaagaccatttaaatcaattaattatttcaggaattacaggttcacaaaatgaagcccgtgtcacacttgttggtgttgatgcaaaggtcaatggtgcaggtcaattatttgaaaagattgctgatgccaatgttaatgttaatgtttttaatcaagcactcgttggtggaggaaagatggatatttctttaattatcaatgataaagatgttcctgcagttgtagaagtgattaatgatttaaaagaaatattaaaaccacaaaagacaattgtgagaggtaatattggtaaagttgctgttattggtgtgggtattaaaaacaataagggaatgttccaaaaggtttataatactttaatgagcaatgatattaatgtagaaatgacctcttgtagtgaaattaatatttcttgttatattgatagagatgatgtaaaaaaagcgcaagttttattacatgaagcattcttaggttagggaggatataaaaatgaaaaaatataaagttgctattgtaggtgctactggtgctgtagggagagaaatgttgagatgtatttttcaattcaattttccttttgaaagtcttaaattattagcttcagcaagaagtgctggtaaagtgattgaatttgaaggacaagaatttgttgtagaagaattaactgaaaattcatttgaaggtgttgatgtggcattttggagtgctggaggaagtatttctgaaaaatatatgccttatgctgtaaaagcaggatgtgtcaatattgataacacatctcattttagaatggatccagaagttcctttagttgtacctgaagtgaatgctgaggcattaaaagatcataaaggaattattgctaatccaaattgtactacaattattatggcaagtgctttaaatcgtttaaatgaatattttgatattgaaagaattgttgtttctacatatcaagctgtttctggtgcaggagttgctggtatggaagaactttatagacaatcacaagaggttttagatggtaaagaaccagttgctaaaacattaccttgtgcttcagataaaaaacattatccaattgcattcaactgtattccacaagttgataagtttgatttagataatgcttttactaaagaagaaatgaagatggttaatgaaacaaagaaaatctttaataaagatattaaagttaatgccacttgtgttcgtgtacctgttttaagaggtcatagtgaatctgtttatattgaaacaaagaaacctcttgatatggataaagtcttagaattattatctgattctcatggtgttgatttatatgatgatattgagaatcaaatttatccaatggcaacattgtttattggtgatgaattagtgcatgtaggacgtgtaagaaaagatttagataatgatcatggattaagtatgtggattgtttctgatcaattgatgaagggtgccgcttataactcagtagatattggtttaaaaatgattgaaatgggtctattatagtgtcaacttatttaatacctattcaagtagcgatgattgtttttccattcatcgctttttgtttgacattaccttatgttattcaccaatatcataaatatggttccattcctattttaagaactcttatcattttttcttttatctattatcttattaatgcttattttatgactatattacctttaccatctgttgaagaagtctctaaaatgacttcaccaactatgtctcttgtcccttttactgccttaaaagatatcgtatcttcatccccttttatttataacgacccttctacatatcttcctgctttaactcaacctatgatgcgagtgacattatttaacatattattaacactcccttttggtatttatttacgatattatttccaatatagtttcaaaaaaactgtactctttacatttttattatcattgtcttttgaactgattcaattgagtgccctatttggatattatcctcgaccttatcgcttatttgaagtagatgaccttattaccaataccttaggaggaatgctgggatatgcgatttgtccactatttgctagggttctgccaacaagagaaaagttagatgctattgcatatgaaaaaggacaaaaagtttctaagcctagaaatttctttgccttcttaattgattttattttgatgataacttgtttattactttttaaattctttcatgtatcttatcatataagttactttattgttgctataatactatatatcattttaccatttattcatcatggtcaaactattggtaaattcttaactaagattgctttagaaagccaagataaaacaaagaaatatcaatatctcattcattatattccattgtacttattgatattccctaccccatattatatatatcagcttttacaattaacttcaaaagtcaatcctattctttgctatatgagtattattttgcttatcattattttctttcttactatatgtcaatatattctttcattcttttcatcatcacaaatgtggtttgattatttttcacatttacatcatatttcactaacaaaagcaaaaatgtaatagactattgcctattacattttttatttgttaatcttcttttttacgactcatccagaatcctgccaaagctaatagggcaagtgctacaaaactaataattgcagtatcatcacttgtttgagtagatgtatctgtttgttgattattgttttgattgttatttggtgtattattttgattatttccttgattaccatttggtttattgttatcaggtttatcattttgtccaccattattaggattatctggtttttctggatcttgaggacgtgcttttaattgattaattgctttttgtaattgtaattctaatgcatcaacatctttttgagacatttcagaagcattttctaattgtttttcaatcgcattcatttctttaataagtgcattataagaatcttcagtatatttattcttatctaatgtcttaacaagattaattaatgcttctactcctgatgtatctgatcttacaactaatttcttagttgcagcttttaattcatcaattaaactagaaatttcagctgaagtactttcattttccttcacaactttattaactttatctaaaacaggtttaaattcagcccaacttgcttttgtataatcttcttccttatatacatcagctaaagcttttaatccttttaattcagttgttgtagcttttaatactaattcaccacgagctttttgtaatgcagtatgtgcttctttaattgcatcagcagttgcactttcatcttttaaaatatcattagcagcttttaatgcttctttaaatggatctgcagtctttgttaaatataacgtagtatctaaatcattcaatttattactatcgatatattgagctaagctttccttattaacttgagcaactgtaataagttgagattgttgttttgctaatttttcaacaatttctacaacttctctttctgttatttcagcagcatctttctctaataatttgttagcttcaatcacaacatcttgtaaagcttgccatgattcttcagtataaagagttttatctaatttattaattgattctaatgattgattaactttttcgatatcacctcttacaactaaagcagtttgagctaattgcaattcacgatatactttagctacatcttcttttgtagctgcagtattatcaagaacatctttagcattctttaatttactactaaatactttataactagaagccgtataaacttcttctttgacatctaatgatgtaatatatttttctaattcttttttacctggtaaatattcatcttgtgtcattgctacaacttcacttattgtaggaacttgaccttcttcccaaacaatctttaattctaatgtcttattaaatggtaagtaaatttcatttaagctcttacttaatgtaccaacttgtacccattctctctttccatcatgttcaacataagccataacttttgcatttgtgatggtacccttttgaacaatgttgtatttcttaacatctaaattatcagataatgtgtattggatatatccagcttttgttgtattaggtttataagaagttgttaaatcaccatcaaacatgttttgaggttgatatccttgaacttcaataacatttgaatcaaatgttggatcattcataactggtacatattcaccatcgttaataacgatttcattaaatactacagcacgattattgtttgatgcagtcattaaaatcttaacataacgagcttttgttgtatcaatttgtccttcaacataaactttatttggatatttgcttgaatttttatatccagcatcagagtcaccacaaataatatttgcgtcccctttattttcaacaccatcaccaattgtaacaacttttgtccaattttctaaatcatttgaaataagaatatctgcatctctaatgtagttaacagcactatcttgacagaacatagctaatttagaaatatctcttacttgtcctaaatcatagataatatattgtcccttttgaggtaaatcaccaaattctgttgttgtatcaacattaccatcaaatgcagcaccattataacgtgaatcttctgccacaccccatgatgactcaatacccatagttgtttcatataaggatggtgcgcttacttcattagaagtaacagtaaattcttttaaagtaaatgtaacagtatctttatttaagttaattaaacgaacataacgtgcatctggtaaagattttgcatttaaagtttgccaatctactttatttttagagacttgaattgccaatttatcattagcagttgaatcactattaatttcttttaaatctttaattcttgttaaatcaacaccaataaattcattttcttttaatgttacttcaccagctgcaattaattttgcagttgcttcttcaacattagctttaatgttattttttgtatttgaataaatatgatcagttgtataaccttcatccacactaaattctttaactgagaattcagagaaaataatccatgcctttttatcttctgagttaaccaaacgaacataacgtgcttctaaaccatttaagttctcatcaatataatccttaccttgagatacacctgtatatgatttataagttttccattgtgttccatcaactgaatattctaatgtatatttttcccatttatcaccagctgcacgatttccacctactacagcatgaacttttccaacttcaataacttttccaaaatcccatccaatataatcacctttttgagtacttggctgagtatcaaaatctaaagcagtatcattattatcatcaataagattacttacagttccatcataaactttccatctaggagtatattcaaatgttgctgtatctttttgttctttttctgttacattaaagttaaataattgccaccaataaccatgaccagcatcttttaaatttaattctaagtttctaactctaacagctttagctttaatattttgactagaaacatctaaagatacttcagcatcaccattataagtcttaatttctttccattcttttccatctacactatattcaaagacatattttgtgattttatcagttccacttgcttgtttaaataaaatacttcctaataatttaggttgatcaaaagtaagagttactgttgcatcaacaggaatataatcttcatatgtagcaccagctggtttataaggatattctgcaaaatgagcataagaagtcatatcttcatcaataacattatttaaagatccacctctagctgcaattttatccacagttactgttgttttattttcaactggttgttcttcttcagttggattaacaacgatatcacgaatacctaaccatgtattacccttatctgcagtggcaatcattctaattcccttaacaccttttaaacctaagtcttttaaaacaacttcatttggtaattcatagattttatcatctaaatccttccattcttttccatcagttgtatattgaactttagcttttgagaatgtatccactaagttcccagagcgtcctaatctaaagataaccttatcaatatcaattgcctttgtataagaaattcctacataagtaccagtagaaatactattagggttcttataaacaatttcagtagatgctttattatcaaatactgaatttatattaccatcaggtgtatcactacgatttgtaatatatgatacaatttgaatatttggatcaacaattgttgaaacttttacagataaaatttgatctaatttcttcataaatggataaatatgttgtctacccactttagcatgttcataatgatctacataataatatgaatatgtttgagatttttcaaatgcagcttgtccattagcaaataaatcccaaatagttgcattttcagcatcttcttgtaaagcaattgcagcatctaaataattagtaatagatacagttgtattttgccaacaatttaaccaatagataatttgatctcttgttcttgtattacctggattagctttgtaatatgcagcagcatcttgtaaaactttaaattcagcttttaattcttcagcttgtgctttgatatctttaccagcttcaaaatcactaataaaagcatttaattttggtgctaattcttctgattcagggataccagtattagaatttttcatatgtttactgatttctcttaaagcaattgatgattttgtatcttcaattgttccatggtccatataattaaatgaatcatgccaatttttatcagcatcttcttgtgtttgccaaatcttccaagaataatcagcatttgcaaacaatccttgtttactagcttcagattgttgcattggatttaaaataattcccttaattttagaagcatcagctccaatttttaagaatctttctgctccacccataattaaaccatcttttgtgttatcactacatggccagttaatccataagaatggtgcagtaccaacattaccaatgaatctatctaagaaatcattgttgacagaaccccaaacagctccaccagtttgaataatgcttacattgcttggcatttcttttaattcttttaattgactacttgttccatcaccataataatatgacggacagaaaatcatatcagtctttaaaccagcaacagttttttgtttttcttttaaccaatttgttaaatcagtcattaatcttacataactagctcctccaccaattggagttagagcatcatcagctaagatagcaaattgtttaacaccaacattcattaattgagtgaattttgtttttataatgtttaaatcttcgttataatcttcatcagtgtcaaatcttaatgcatttgtcataaaaggatgtaatgcataaacataataacatttgttttgatttccaatttcagctaattttccaatggcttttaattcttcatcagtatacatagctttccattgactgttatgtttaggatcatctttaggtgcatatacatattcattaagtttgtaatctccaccataagtcattaaatcagcacgatcttcatttgaccatggatttccataataaccttcaataaaccctcttgattttacatcagcaaaatcattcataactaattctttaatctgattatctttaatttgattaaaaatatgttttaaagttgtcactccatggaatgcagcatctgtatctctacccaagatagcaatcactccatctttcacacttaaaatatatgcatcaaatttattaaagaattttgcatctttaattaaagaattttttgtgaaataatcattaacagcatcatctttaccgtaaataccaactaaaacatttgttttatcagcagcaatgcttgttgattcacttccacttttcttaagtattgtcaatacatcattaacatgattttttgtatatttatcaatatcttgactatacacaatgttcatgcttgaagataacgtaaatgatttttcatcattatatgttatttcttgtggtgttggataaattgtatactttgcatcagcagctttaacagaatttattgttaaagtacacaataccatcatcattgacaataaaaattttaatgatttgttaaacatttttcttcctccctcatttttaagaattgtcaaaaaaacaaaaaaagcaagacttcaaaaagataacacagaaaagtgttttcctcttgaggtcttgcctaatcgaattagtaacaatcctttacggcacaatgataccccttacagcgaatattgtcaataaaaaattttcataatttgaaaattattccaaattccgtttaatatgtaaatacaaataagtctgttcatttggtgataaaatatagccatatttatctctaacatgattaactattctattcatacataatgtcattctcacatcatcctcaaaaaaagttctaatatctgaggttgtatcttttaattcaattggattatttttaaagacacgttcacctaagtattttaaatgtgttgaaatacgtgaataagcaaaagaatcttgatctaatgtaattttcattgttttttgaataatttctaatacttctttagttaaagataaaactttcactgtataatgtgaatctgcatttaaagaaaaattaacaagatgtaatgcaatataaccggcttcatcttcatctaattttacttttgtacgtttataaatataataaagagcccatttcccaatcgcatattcttctttatataatgtttttgtttcattgagtaaaacatttggaagataaataccttctaattttcttttaatcgcaaaagaaatatgatcactgattgctaaaaagatttctccactaaattcagtatgtaacttttttgaagcatttgaaacaatatattcagctatttcaaaatatacagtaggaattttttctaaggatttttcaaatcttgttttttgatcatcttgaaaaacataagttctttctattttagattcatcaacttgatctcctacctttttatgaaatccaataccagaaccaaccaagataatatcactcccactattagaaatcgcagcaacactattattattaaaaacctttaatatcaccatatcaatcacctacctaatatttctttcataacatctacaataaattcaacatctatccctaaaataatttgcaaactatctttccctaatttaacaatcccacttgctccaactgctaagattttattctcatcaatacaactcatatcctttaaatctattcttaaccttgttaaacaactatccacaaacacaatattacttgcaccacctaaagcctcaattaaaataattgccatatcatcataatcaagttgattgacttcataatgatattgaggcttttccacttgaataatattttcctcaatttctctccctggagtcattaaccgataatgaacaatcataaatctaaatactaaataataaatcaaaaaacatataattcctaaaggaatcaacatcaatatatcatgagcaaaaggtgctttaatacttaaaacataatcaataaatcctgccgaaaatccaaatcctgcaatccacttaaaagttgctgctatatacataaaaacccctgttaataaagcatgtataaaatacaaactaggagcagcaaacataaaagtaaattcaagtggttccgtaacaccagtcaaaaaagaagcaaaagcagctgataagagaatagcgccaacttgttttcttttttcttttctcgcacatttatatattgcgactgcggcacctggtaagccaaacatcataattggaaaaaatcctgcttgatacattccagttacgccaacaacaccaccagatactctcccccagaatttaccaatatcatcaattccagcgacatcaaaccaaaaaacagaatttaaagcatgatgtaatcctgtaggtattaatagacgattaaagaaaccatataatgctgcaccaaatggtcctaatttagacataaattctccaaacattataaaagcattaaataaatttggccaaatgactaaaaataaagctgatattaaaagcgttgttgcactacaaataattggcacaaatctttttccaccaaaaaaagataacgattgtggaagttgaatatgatgaaacttctgataatagaaagcacacatcaatccaatcataatcccaattaaagcattcgatgaattattaaaagcaattggaacttctttcaaaggaatatccataagtagtgatacagtttttgcagatagtaacttattaatgatcatatatgaaacaactgcactcataactagcatagcatctttatcttctaccatcccaatagctatcccaattgcaaatagtaaaggcaaattatctatgatgacaccacctgactcaattaaaaaggcagcaataacattatttgctccccaccccactggatcaatccaataaccaatgccttttaaaatcgcagcaataggcataatagaaactggcaacataagggatttacctaatctttgtaaatacttcatgatattatttaatcctttcttacttcaaatagttaagtctttaaaagtaaacatttttatacaccacaaattctagtccccatataatgatatctattcttatttataattacaagtatttttatgacaaccttaatcctcttatgtactacttgacatctcatagaaaaatatatagaataaaattatgatgtgactattcaattaggcatgagcaatctctattttgctgatgtcttttttgaggaagtggaggcttagtatgtttttaaagaaaaacacaattattcatgctatttgtgatggaaaaattgtttatcttgatgatattgatgattatgccttttcgcattatctcattggtgatggtattgcaattgaaacagatcaaagggaaatttattcaccatgtgatggtatcataacaactatcgctcaatctggtcatgcttttacaatgcaattaaaaaatggtattgaattacttatccacattggtatcaatcatcaacaccattcatctgaatattttcattatcatattcaagtgggggaacaagtgacttctcaaacacttattctcactttagataaaaactatatctcacttcacaatcatgaaattcttattccaattattgttttaaattctcaagagcatcctattaaaacaatgacaacttctccaaaagtaaccttagggcagaaaattttaacattaaaataaaaaatgataacaaaaaaacaagatagccaatggataaatagctatcttgttttattttaatgtctaacaatcttataatatgttctcgctgttaaaatatagacaatgctatatataatcgtcaaaacaacaactgaaatagctgtacaaataataaagacttcaggaccagataacaccaagaaactaaacatattcacaatcatcttgaaggcaaatgccatatgaataactgcaacaattaatggtaagaagaagaaaattaagacttgtgagcgaattgtctgtttcacttcttttttactcatacctacattttgcataatctcaaatcgtttttgatcttcataaccttctgataattgtttataatacataatcaaaatagctgccatcaagaacaagactcctaagaaaatacctaagaagaataaacttccatacatttgtgtcaacatactttcaatactataatgagattccatataataatgtgaagataattctgattgtcttacttcattttctacacaatcctttaaaacttcattagctttttcagcatgactctcatctttatattgaatagaaagggtttcaatataattcatatgaggatcctcaggagtcactgataatgttttttccaatgtttgagtatctgggaaaacaactgcgacttctttaccagcaacttgtttttcatgttctagtagaaatggtttatgaacagtttctttaactgcaaacgaatgtttcccaatttgaaaatctttttgaggttgaaagtaattactactcataataatttcattctttgttaatttttgattatcgtgataagcacgattatattcatcaagagttaaccctataactgtaatagcctcttttccataattatcacttaatgcaacctgatttgctttgtttgaagccatgttcacaataacataacgtctatttacaaaatcagtatattcaatatcattacgatttaattgttgttctagttttgcataaagaacctttaaatctttgtcacttggataagcattatcatcatctaaataaaattttaattgaaaactttcatcaagaatcttatttgctgtatcttgaactcctgaataaagtgatactgtacttgataacataaccaatatacatgtacataaaatacaaatacttgcaagtcctacagcattttgtttcatacgataaatcaattgagaaacggacgtaaaatgttttgtttgataatagaaatgtttatttgcttttaacatctttaagattgcaatagaaccagctgtaaataaacaatatgttccaataataactaagataactgctataaagaacaataaaatagctgtagctggatcttcaatagtttgagcaataaaatatcctccacctaatgtgaaaaccccaataattgtgagtagccattttgtctttggttctttttcaccagtttgaccacctcttaaaagctcaataggatttgctaatttaatttgaatcacattaaataaataagataccataaagataggtgtataaatcaaaattgttttcacaatcgcatcggtagatattccaatagaaatagcagttgaaaaaccaaccaatttgacaagtaataagaacatcaatttactaaagagaactcctagtagtatccctccagctaaagaaatcagtgttgttacaatggtttcgcaaaacatcataatcatcacatgtttcttttccatacctaaaatattataaagagcaacttctttttttcttctcttaataataaagctattgatatagaataagaaaatcacagaaaagataatcacaacatagacacccaaaccaagaatcatactcatcgtttgagccccagcgtccatctttaaaacaccactattcactgataaactataaatcaaataaaacatcataacagtaaaagcactggttaataaataaggaatgtagacttttccatttttcttaatatttgttaatgctaaacgaggataaaagaatgttttcattttattttcctcctgtcgcaagtaatgttagtgtatcagaaatgctttgatacatttcttcgtttgtttgatttcctttataaagttgatggaaaacttcaccatcacggatgaaaagaacacgtttggcataacttgctgctttggtactgtgggtaaccataacaattgtttgtccttcatcattgattgtatcaaagatatctaataattgatctgttgatttagaatctaaagctcctgttggttcatcggctagaatgatttgtggatgtgtaatcaatgctcttgcaaccgcaactctttgtttttgtccacctgaaacttcataaggatatttttctaatagtttttcaattcctagttttggtgctaagttatctagcttttgtttcataataggatatgcttctttagataagactaatggtaaaaagatattgtctttaattgaaaatgtatctaataaattaaaatcttgaaaaacaaatcctaaattctttcttctaaattgagaaatttctttttccttaatacgagtaatatctttcccattcaataaaacctcaccacttgttggcttatcaagtgatgccaatatattcaagagagttgttttcccactccctgattcacccattatcgcaacatattctccttcttccacactaaaggatacattggataaagcttgaacctgttgattagaaaaacgtgtagtataaaccttctttaaatttttaacttctaatagtgacataataacttcctcctttgtacaaccatagtttataaaaaaaagagaaattgtaccatagattaatcttacaattatcctctcttatcttacaatcatgtaagttatttaacttttaaatcatcaacatgaaaattaatcgaaacaatcgttccttttcctagttttgaatgtaattcaatatgatgacccaaattatctaaaattgttttacacaaatataaaccaagaccactcgcctttttatcaattcttccattatatccagtaaaccccttttcaaacaacctaggtaagtcttcttccttaatcccaattccactatcttcaatatataaagtttcatctttcacatatattgaaattgttccctcttttgtatattttaaagcatttgataaaacttgttcaatcacaaaagatatccatttttcatctgaaagaatcatcaaatcaataggttcatattgtaattttaatttcttttgaataaaaaatgttgcttgtttctttacgacatcattaacaatatcatttaattgataacgtcttaaacgtaaatctgatgtcatatgatcaatcttaatataatgtaataccatatctacatattgttcaatatgtaacacttgcatcaataattcattttgtgaacactcttgtgattgaataagcaatcttaaagctgaaataggtgttttgatttgatgcacccataaagtaaaataatccaacatatcatgataatcttgatcattttgattttctaaagcaatatgaagctgattaacttttaagaatagttgttgatattgttgttcaattaataatgatgttttaggtaaatctacaactgaaacatcatttaatcttaaaagataatctatttgttttgtttttttattatatttataaaaatctacaagaaaataaaaaacaagaattgctgatgataatatcaaagcataatcaattgcatcaatcaaagcattatataaatataaaataaaataaaagactcccatgatcaataaagcaaaaagatagaagaaataacgatttttaaagtaatgaagcagtctcatcataagccaatttataacctatacctttcttagtttgaatcaaagaatccaaaccaaaatcatctaacttctttcttaaacgattcatattgacacttaatgtattatcatcaacaaattgatcactttgccataattcaatcattaattcatctcttgaaacatatgcttcagctttttcaaataacatttgcataatctttaattcatttttagttaattcaatcacttgatcatgataactgactgttgcttctaataaatttaaaatcaactctttataggttaaaatatgaaattgcttagaaaaagagtatgttcttctaatcatagcttgaatctttgccgtaataacattcaaatcaaaaggcttattaataaaatcatcagctcccatattcattgccatcacaatattcatattttcattcgttgatgagatgaaaataattggaatttctgaaactttacgcatttcttgacaccaatgataaccattataaaaaggcaaagaaatatctaataaaactaaagtcggctggtaatccaaaaagacttccatgacatgttcaaaatcttcaacaacataaacttcaaaattccatttctctaaatgtctttttaaagttgatgatatcacttcatcatcttctacaatcataattttttgcatgattcatcacctcagccccattataacacatcttcataaagactgaccattttcataagacgtttttttatatcttcttttaatgccgttggagcaatcactttgacttgatcctgcaacatcatcagccaacctatcaatccttctgaaataggagtattctcaattgttattaaataatgatcttgatataatttttgaatatgaatatccataccaaatcttgataccaattctcttaatagcttatgatcacattctaactgtaaagtatcacgtaaagttgatgtatacatattggtcattttttcgatttcatcaatcatatcaaattgttctcgaatatcttgataactcaaatgtgtagtctgaataaaacgcatacgatcaatacgatatgttgataatcttccttgatatttttcattataaccaatcacgtaatagtgattattttgtgaaacaatttgatatggtgaaaggatgtattgatcgtttttatttcctttaagtgatggaacttcctttaaatgataggcttcgatttcatagtttatgtattggaaagtcaggactgttttgttttcaatggctttcatgatattggaaagatttaaaaacaatgaaaaggataatgatttttctgttgcttgaaagtgaacaagtctttgttgttgatgataagaagataattgtaataattttaagacgagttgttttttatcttcactttttaaatcttgatgaaaagcaatactatcacataaaaactgcaattcaccatcttcaaagaattctttttgaatcctgagaccaccctttcttacaatcaatatcaaattatctccaatccattcatagaaaaactcattaatccgatgaacacaagaatgaatcgtcttaatatcaacttgaatatcatattcctttaatctttctaaaacttcctgactcgttattgtctttccttttgcttccataataatcttgaaaacataatacatcctttttcccatcatatcctcctaatgacttactgccaactgatatcctcttttcttttttgcataatgacgcattaaagacacataatcataaacactataactacataataaatctaaaacaacctcatcatcacaatcattaagactttttaaataagtataagccaaatgatattgatcttctaataaacaaatcttcgcacattcaatagcttctacatcataataaacatgtaatttattaataaatttagaaaaatctatgtttttaaaatcaatcagatgtctaataatacaatactcatgaaccgaaatactttttttacaaatcttaaaaagcaattcatgtttaatttcttgataactttcattatcaaataaagcattcatcataattaaatggtactctaattgctcatagtcacttacctgatatagagcttttaaagcatagataaataattttttatagaaaacatcttgtctgagaatctgtaataattgatgatgagtcatacaatcctctaataaatgtaataaagcatcatcctgacaaatctttaataaataatctttctttttccctaatgtcacatcacatactgtttgataatcttgtttcataatctcatctccttgtactcttattataataagtatacaaagatgatgtttgatatatacctataataacaccgttttttcggttttaatattaaaaagttaaattttttataaaaaaacagggttattcaccctgccttgattgatatattttatctatgatgatgtttttaacctcatcattttctaaaagcactgaatcaaaatattgataatgtcctagtaatgcttcttttattttttgaatatcttgatgataatgatatcctttttgtaggataaaaggaatgattctatcatagtcctttatttgagggatatgatcaaaataagtaacatcaccatattgatttaataaatgatagagatgttgatgtggacttggatgaattaaaaataaacgcttttctggttgttgataaagtttattcattaactcctgctctttaaataaagctgataaaactggaattggtactgtttgtttgatacgtttatatataattccttcacttattgtcatcggttgtatgttccatttgatatgaatcattaaaagtgtttctaacttttgttgataatcactttcttgacaagagaaaatcagtgcttttgcaaaactagcaaaactataagcttcttcattaatatgatgaggaaaaagcaacacaattccttgtctttgtaaaaccattgtataaagtaattttaattcttctaaagataataacataatagaatgaaagaaactttgacgttgattttcttcaaccaattgatgatttaaaatctctactcgtaataaagaaagcacttctaaataatcatcatatccttttaaatcattttttaattttaaagataaagctgggtattgtccatttgttgaaacccctaaagtcatttgattggtgtgaatcgttgccatactatgaaatggagtattggtctttgttgcacttgcacacataattttttgtttcaaagcatcatcaacaatttgttgatttttagtctttgaagaagttgccgcaaacacaaagaaagcatcttttatatcatcaatatcataatctttatatatcttttgacattctaatgatgaaaattcttctttaatttcactagcgacaatacttaccaatgctccttcttgtaagaaagctttagcttttcgataagcaaccttccctccaccaacaatcacaactctttgatttgtaaaatcaatcagccatggcatcataaacttttaccaatgcttgatgaatagctgtaagtgtgtcatctaaatcttgtttagtatgactatcactaataaaccatgcttcaaattgacttggagcaatcaagattccttgttttaacatttctttaaagaaaattgtataaagatgtgtatcacatgtttgaacatctgtatattgatgaacatcttgagcagtgaagaataaagttaataaacttccaacttgatgaacctgaaaaggtaaatgcaattcatttaaaatcttttcaatacctttagctaagtattgagctgaagatgtaatatgttgataaacctctggatgatcttttaaataagttaattgtgcatatccaactctcatagctagtggatttcctgataatgttccagcttgataaattggtcctgatggcgaaacaagttccatgatttctttttttccaccataagcaccaacaggcaatcctcccccaatgattttaccaaagcataccatatcaggaacaactcctaagaattttggacaactatgatagtcaactctaaatccagtaataacttcatcaaaaataagcacaatatgatattcatcacacagttgtcttaaaccttttaaaaattcttcatcagcttgaataatccccatatttgctgcaataggctctaaaataattgctgcaatatcttcagggtattgttcaattgcctttttaactgatgttaaatcattataaacacaaacaattgtctgagaaactgtttcttcaggtatccctaaactcgttggagtttgaaaagtcatagctccagaaccggctttaaccaaaagaccatcactatgtccatgataatttccttcaaatttaataatcttatttctctttgtatatcctcttgcaactcttaaagcactcatcgttgcttcagttcctgaattaaccatacgaaccatatcaattccttcataactttccacaactaactttgccatttcaacttcaatctttgttggcaatccaaaactacttccatattgacttgcttcaataattgcctgttgaatgacagggtgattatgccctaagattaagggtccccatgaacaaatataatcaatatattcatgattttcttcatccaacacacgtgatccttttgcgctttttacaaacactggcgcactttcaacagattgaaaagctcgtactggtgaattgactccacctgggatatattgacacgcttcatcaaataattcttgattagacattttgctcatccttccattttcttgcaatatcaattgcaaaatatgtaataatcatatcagcaccagcacgtttgattgctaataatgattcttcaatgactgattccttcatcaatccttgttcaactgccatttttaacatagcatattcaccactcacattatacgcacaaattggcatattaaagtttagtttagcttctttaataacatccaagaaagctaaagcaggtttaaccatgataatatcagcaccttcatctatatcagcagctatttcacgtaaagcttcttgaccattagccacatccatttgatatgtactacgatttccaaatgctggggcactatgtgctgcttcacggaatggaccataataagctgatgcatattttgcactataacccataattggtaaatcataataaccattttcatctaagatttgacgcatagcagctatttcaccatccatcatcgcacttggagcaaccatatcaacaccactattagcataacttaaagtaatcttttgcagataaggtaatgtcgcatcattaagcacttgaccatgttcatctaaaattccacaatgtccatgatcagtatattcacacatacaaacatccccaatcacatacatgctaggatcgatttcttttattttacgaatagcttgttgtaatattccatgttcatcataagcttgacttccacaagcatctttatgttcaggaataccaaataaaatacaagccttgacacccactttctgcatctctttcactacttctgctaaacgatcaactgaataatgataaataccttttaaagaagaaatttcattttttatattttcaccttcaactacaaaaataggataaatcaattgattggcatgaagatgtgtttctcgcattaatcctcttgtcacttcattatttcttaatcttctacctctataaaacatcttttataccctccattttctcaatcataccttgataacttgaatgacttgcctcaataatttcaacatctggataatattgacgaatcgctttagtcgtcattggtccaattgacaatgctttttcaaatgtacaagcttgttgtgataatctttgaactgatgatgcacatgtaaaacatgctaagtcataatgcttatctacattgatttcaatttctttattttcataaacacttatatactgatcagtttcatgtaatctttcaattgcacaatgtgatttttcacaaatcacaatcatatgttcatcatcatgaacatatttctttaaatcaagattaaaagctatactattggcttgatgagataaaatatcactataaaaaccatattgatttaagacttgttcagtcttttgtccaatacatgcaaaacgagcatgagataattgtcttaaatcaaaacgttcttgacttaaccatttgaaaaatccttttaccccattttgacttgtcaaaacaattacactatgatcaaatgatggtatttgaataggttgaatatattctatttttcctaattgtaactggtcaaccattgctccttgttcttgaaaatactgtgttaaaactgattgttttccatttaaagttgtgataagaacatgcgtttggaaataaggtttttttgtatagaaatcaagttttgtatgtaaagagacaacttgtcctaaaacaattaacagtggtgaagggagtggatgtttgtcatacatatctaaaattgtttctaatgttccataacaggcatcttgatttggtaatgttgcattggatattaaagccattggtgtttgaggattttttcctacttttaataattgttcaacaataactgataatttagcttttcccatcataaagacataggtcaaatcatcatttaaaaaacgttgataatcccactcatcctgctgattttgaaaatgtgcagtaaccacttcaaatccagaacttaaaccacgatgagtaatcggaatccccccataacaaagtccagcaatcgatgaagacaatcctggtacaacttcaaaatcaatatgattttcatacaatgttagagcttcttcaccaccacgtccaaagacaaaaacatcgccaccttttaaacgaacaactttttcataaactttggctttttctacaagtaatgcattaatatcttcttgtttcatggtatgataatgagattgtttcccaacataaatacattcacaatcttctttaacataatttaaaattcgttcatcaatcaaacggtcataaaccaaacaatctgcttcttctatacatcgcattgcttttaatgtatataaatccaaagctcctggtcctccacctactaaataaactttacctgccataaacttcttccttcaactttcttgcgatttctttcaccttttcttcaccttcatcaagtgaaaaaacttcgtctttttttatcagcttactcccatcctcatttcctaaaactgcatagaaatgaataagattaccttcttgtttagcataacttccaaccggaatatgacatcctccattgacttgagctaaaaacaatgattctaatttcattctttgattagcctgctcatccccaattgcttctagcatctctagtaatggactatcttttaaaacttgtaaagctaaaataccttgaccacaagctggaatcatctgtgtctcatcaaagtattctgtaatttcatcttctaatcctaaacgctttaaaccagcacttgctaaaactaaaccatcaatattttgagtacgaagtttttctaaacgtgtattgacattaccacgaatccccacaatttgtaaatcaggacgcattgctagtaattgataatagcgtcgtttactccctgttgcaataatactatgctttggtaattcagctaaacttttataattttttaaaaccaaacaatcacgataatcactcgctgataatgttttggcaaaagttaaaccttcagccattgtactaggcatatcttttaaactatggactgctaaatcaatagtatgatctaataattctttttcaatttctttgacaaagattcctttatcattgattttatctaaagcaacatcttgaatcttatcaccttttgtacgaatgatttttatttcatatgtatgcataggatatgctttttctaattgtgctttgacatattctgtttgggttaatgctaatgctgagcctcttgttccaattgttattttcatttttgttcctcttttatatcaaataattgatgaataatatctacattttcaatttcttttgtttttatataatgaataggttctctaatcatttgaagaaatgatgcttttagcgtcttttgtaagatgtattgttctctttgtgataaatctaatttattaattaatatctgataagtacgctcagccatttctagactttttgcctgtaatgattgtatcatataatcattttgaatactactcaactttgtttcgataacttcaacttcttcttttattctttgatgtatacatatctcatcttgttgtcttaattgattattcacatcaatttcttgttgtagactttcaaaatcaatacattcaacatacttatttttttcaatatctctaggaatcgctaaatcaatagcaatcaaatgtgtattgataaaatctttagcgtaaaagatataatgaggactagatgttgcactgattaaaacatctatttcatctaaatattttaaacgttcatcaaaagtaacatattgaatatctggatatttttgtttaatatcttcaacacgagatgatgtacggttagctaaataaatttcattttggggataaagataaggtagacaagataaagcaacttctcctgctccaacaatcatgattttcttttgatttaatgtcatatttttcttcaaatgatcaatcgcaacatgacttaatgataatgatggttgtgaaaattctgttttgatttgttttacaaaatgaatcacttcagcaaaaatcaaattaatttctttaccacctatttgcatatttctagtaaaatcataggcttgtttcacttgtccaagaatttgatcttctcttactaacatagattctaatccacaagcgacactcaccaaatgaaaaatagcttcttttccttgataggtaaaaatagctggtgaatcagctaaataatcaatatataaatctttaactgactgaacttcattattttgatacatgaaataaacttcactacggttacatgttgaaagaataatgcattgttcaatgcctttttctaataataagccagcaaactctaatttctggctatcagtaaaatgaaaacaaccacgtgcatcgattgctaattctttgtgactaataccaacaacagctagtttcataactttttaaaaaaccacgcgagcgtggtttttattctttaggtcctgcttttttatgttgtgataatggtttcaaatgaatgtttgcacgttgttcattttctgtccaatataattcttcggcaactaaacattcaggatttaattcaacaccatctaaaattaattctttgaattttggatatcctgaaatatcaattaagtgaccaccatgtaagtattctggcttattatccataacccatgcagagaatttttgccaatttccaaaaacttgtaataaagcttcttcactaatccagttcaagaagattttacccattcttggatattgtttaccagtacgtccacctaatgttacacgatagaaagtcttttcttgtcttgtccaagcacttgtaggacatgcaataacacattcaccacatcctacacaacaacatgtatctttatcaatcttaccatctttatttaaagataaaactcttgttgcatgatgttcacaagctcttacacaagctccacatccaatacatctttcttgatgatattccattttagcaatacccataataccaaagtcattgaaatgaccttttgcacagtcattaggacatccagcaattgatactttaatgtggtaatgactagggaaaattaatttttcaatcttacgagctaattgataagtattaacattagctttaatacaatgagaattaccaatacaactcataatattacgtgctccgattgttggatatccatgttcattaacatccatatcaacatcacacatttctacttcaatatcatgaatgtagtttttaatatacttattgacttcttcaatattttcatatttaataccagggatatttaatgtttgacgcatcccaatatggaatgttccatttccccaattttgtgcgatatcttgcacaatttgtaaatattttgcttcaatcaaagaaccaggaactcgaagttgtaacatgaattcaccagcaaccttagattgtctaaaacaattaattcttagttttttaatatcaatatcatgattcattcttgttaccctcctagtctactaaatatttagcttttgtataattgaaaactggtccatctaaacaaacataagtttcgtcaatacggcaatgtccacatttaccaacagcacaagacatttttctttcaaaagaaacccagattttttcttcaggtacacctaagctcataatcttttcagcagtcaatttcatcataattggtggtccaacaacaaccacagcataatttccatcaaaactatcaaatggaacttcttttacataatcagtaacaaatccaacattccatccatcaattttatctctatctaatgtataatatgttgtaaatttttctttccatttctttaattcttctttaaagataataccttcttcatttttgaatccagaaattaaagttaagctttttacataaccatcattttcaaaacaagtatttaacatacttcttactggtgctaaacctgtaccaccagtcacaacaactaaatgtttacctttaaattcatcttcaactggccatccatgtccataaggtccacgtaagaataaagtatctccaacttgtttattaaaaatttcatcagttactttacctacagaacgaatagtgaaatccatccatccttcaccatgagctgatactgaaattggtgcttcaccaattttaggaatagacaattgtaagaattgaccatgatcaggttgaatatctgttttcactttaaaagtatattctaataaactttcctttttaatatcaataatttcacaaggaataggtttaactggattattcatcattacttaccctctctttcaatttcttcaatagcagcagccatcttttcaactgtcttagttactgaaatatattcaggacatcttgaagtacaacgtccacatcctacacacatatgataatctttaaaacgtgctttgtaatcatggaatttatgtaagatcttataacgcatacgatctcctgcagttggacggaatgaatgtccaccagccatatcactaaatccatcaatttgacaagacgctgatgttctcttacgttcaccaatattcatgttttcattatacataatatctgtagttgtaaagcatgtacatgttgaacaagcaattgtacaagcaccacaagaaatacaacgagaattaaaagattgccacattggatgttcttttaattttgcgagaacttctttatctttgatttctggaatcttaacttcaatttgatttttttcaatgaattcaactttgaaatcatcatttgcagcatcttcaaaataagaattgaattcatcatcttttacttcaactaataattcattgtctaaacaacgaactccaatgctgtattcatcagttttatttgttcccatacttacacagaaacaagtatcccaacctgtacaacattccattaaaacaattttaactttttcttgaagacgtttataatagaagtcttcaaaaccaccgttttgtaaataaactctgttttggcgttccattgcatgcacatcacatggacgcataaaaattaaaatctttttgtcattgaccttactttctctgtactcatcttctgtaaaatagaataatggttgagtaatagggctcaatacttctttagctggataatcagatttttgatcaaaaacaacatcttcgatattttctacacgatcataacgaacaatgtcagtatctgaatatcttccttgctttttaaagcgttttggcgcataaatatcatattcatcagataattgttcaaaaatgtgattcatctgcttaaaatcgaccttgtatcccatcatttttcctcctaagtcattttatattttcattatatcattttttgtgttattatgaaaatacaaaaaaacaataatatctattggattttccaatagatagaaaggagatactatgattacccgtaaacatctctatatttttaaaacagttgccacaacacaatccatgtcaaaagctgcacaattgctttatatttctcaaccaacaatatcacagaaaatacaggaaattgaaaatcaatatgatattaaattatttgaacgatattctaaaaaactttttattacagaagaaggtaaaactttattaaatttaaccaattctattcttgggttatatgatgatatggatcatattttttctaaagataatcgtttttcactcaaaattggggcaactttaactgttggaaataccattatatctcctctattaaagcaattaaaagaacaataccctagtatcaatatcgaagtatgtattgataatactcatatcattgaagaaaaaatacttaataattacttagatattgcattaattgaaggtgaattaacccatcccgatttcattgttacaccagtcattcatgataaacttgttttcgcttgtgcctatgattttcctatacctgatactttagaaattcaagaattaacccgttatccttttatcaatcgtgaagaaggtagtggtactcgtgaacaattagaagaatatattaaaaaacatcatattcatttaaaatcttcatgggaatgtcatagctgggaagcagttaaacaagccatcctttataatcatggtattgctttagtgcctttacaacttattgaaaatgaagtctataatggtgatttgaaaattattcctatcgattctatttcgttagaaagagatttttgtatctgttatcataaaaataaaaaagtcacaaaaaaactaagtgcttttattgaaacttgtcaaatatatggtcaagaacttaaaaacggttatattcaaaatcaagactcaattccaaataaatagaattgagtcttttttattatattaaattctatgaaacgattctttgtcggtattgttgacgttctattggtggaatatccaataattccatggcatcttcaatagtacaactattcttcatcattaacttcttaataagcttcatacgttccttatccttgcctattttttcaccttccatgtaaccttcatctcttatcttctgccagatttcacacatctctctctttcctccttcactctctttgtaataccctacctgtttctttaatacttcataattcatactctcaacttctttgcacataaagtcatgcatcagtctccctagctcactatcatcctgtatcgatgcattcacataaatgatttctgtttcatcatcaaagctctctccattttcaacaatccttcttctcacatgatagataggtagatcatatcccaatacatcttcctccgttatgaatataacaattgtctttggaatctctctccatttttcatttggaaagcttagaaatgaatcaatcagactctgatgataccttgcccgcttgggatgggcacctgcttcatctctctgtacttcgatattgatgtaatgacctttattgtctttaaccaatacatcaattgtcagtgacctgccaaggagattcttaaggtcatactgggaatcattctcaatgatttccacatgctcaccaaggatgatatccaagaggagctgaatacaatcctgattcttgaagatgattctcataaagtcatcatcaatcagcctaagcgaggcaatgagatcatcataggacaaacttttttctagaacacttgtagtcatagaacaccttctttctagggaaggatctatcatacaaagattatacagcaatatttgcttatagtaaatagatataaaaaaacataaaaagagtccttaagattatatgtactaaaaaaccttccctattacttatatacgcaaaaaaattcaatttttctttttatttctaaaaaaaattcaaactatttgataaaatagtttgaaccttcattactttattcttcatcaatttctttttttaactcatcaatttctgcttcgaaatcataaatacgatgacgcatttcagcaacttcttcatcaatagaattttgatcttctaataattgaaaataatactttcctaaatcacgataaacatcatcacgatcagattctaaattcttaatctttaatttaattttggcagtaccagccaattcttgtgtcttatcaattgcttcttctgtaaacttcgccgctttttttgttaaatcatcaaatagagccatctttttcacctacccgatatattttttaatatattgaacaccaattccaccaacacccatatgagcaccaactactgatggtaattctcttaattctacttccacttcaccaattttatccaaaatcatttgtttcacttctaatgctgattcttcacataatacatgttcaactgtgaatttataatccttggcattaacgcctaattcaatcatacgattgactaaagttgcacgtgctttagataatgttcttactttagcaagtgtatctattctaccacctaaagcataatttaattccatcactggaacaatttttaacattcctgcaagtaaagcaactgctggagtaatacgcccaccttttttcaaatgatctaagtttggggccataataattgttcctgaatgttcaaccatttcttctaagattgttttgatttcctcagatgttttaccatcttttacaagcttattagcaataaatgttagatatttatgattccctgctgtaccttttgtatcaactaaagtaatcttaatacccaccatatcagcagcaactttcataccatttaaagttgatgataaccctgtcgcaattggtaaaccaattacttcatcatagccagcatcttttattctttctaatacattcatcatctcacctgtagaaggttgagacgtcatgaccataatgccttctctttccattgtttcaaaaacttcaatactactaatatccttttgatccaaaaaagttttatccctcattgtaatacacaatggtacaatatatataccttcattttcatatttaccaatttcaatttggcatccactatccgataaaatagctattctattcactattatccctcttttctaagttatgacttatgttcatattatagaacaaacaagaccttttgacaataaaatgaaatcatatataataaagaaaaagaaaggaaatgaaacatgatatcagttaaagaatatacaaaccatacaattatcataaaaaaatcagaatttatatgtcatttaattccttgcagtcatattgaacaagctaaaaaacttatatcagattatagtgatgaaactgcaacgcataactgtgttgcctacatcattggtcctcatgaaagagcttttgatgatggcgaaccctcaggaacagctggtttacctatgctgaatgttttaaaaatgcaaggtctaacaaatatcattgcaatcgttactagacattttgggggaattaaattaggtgccggtggattaaccagagcatatactcaaagtgttgctgaagctttaaaagaagctgaaattgtagaaaaagaattagttgatttatatcagattactattgactattcttatactcgaaaatttgaacatttattaaaacagttcaacataaaatgtattcatcaagaatataatgaacaagtcacatatcattgttatttaagggatctccaatttttagaacaaattcaagatttaacaaacaatcagtttcattatgaatgtattggttcagattattcagcaaaagaaaattgacattttatcataagattgttataattcatgcaagataagggagtaattagcacatatgtgtaatcatgtcaacatactgatattattatctggcatgattttaaataatgagacttgtctgtgtcaaaagcacagtcatgtcttttttttacgaggaggatattttatggggtttattgaaattgtgattattggtgtcggtttagcaatggacgcttttgcggtgagtatatgcaaaggtctatcaactagaaaattagaagtcaaacatgcacttatctgtggtggatattttggtttttttcaggcaataatgccacttattggctatattttaggggttcaatttaaagataagattgaaagtattgatcattggattgcttttgttttacttgttttaattggtttaaatatgattaaagaagcttttggtgaagaagaatgttgtgatcctgatttttcttttaaagcaatgttacctttagctgtggcaacttctattgatgctttagctattggagtaacatttgcctttttaaatgttaacattctatatgcgattattattattggtattacaacacttattatatctatgattggagtcaagattggtcatgtctttggttcacgatataagtctaaagcagagattgctggtggtatcatcttgattttaatgggaataaaaatattattggaacatttaggaattttgatactttaattcaaactctattcatatttaaggataataatatgattaaggagtgatggaaatgaataatgtctctaagttatatgaagtctatgtcaatagagagttacaaacaactaaaaatgaaatattaaatgtacaaagattaaatcaaaagattttatctttcttacatgatttagctgaagtttctcaagattcacgttgttatttgttttgggaaaaagaagaaactattaatcatcaacaattattagaacattatattgaaggtttaactatgttaatgtctattggttatgaattacgcattgatagtattaaaaaccatacagaaatccctcaacatcaagatatcttttctttattctttaagatttatcattcaatcttaaaagttcaaagtcactattcaagtgatgattatcaaaatacaattgatgattactttactttaggtttccaattaggaattgatatcaatgaaattatagaaaattatcaaaatgattaatcacaaatgataacatctcatgaattaacccataaacgaaaggagacacaatgaaaaactttttaaatggtgtcgttaaaacttttggtgtttcaatctctgcattcatttattcgatttatttattattacataatcaagttccttatgatgtagagaaatctctcaaaccaggaaatacaaaaaagtatattatgattgagattggcttttatgtcagctgtcttattctgcttataagtttaactatatgcctcaattttttaacaaatattccaattattattatgttacatgcctttctctttgtgttcattttagttgttagtgcatttttaaaaaataatctctttatatcatgaaaaaaagctgtaatgaaactattcattcagcttttttcatacttaaaatgtttttttaatttttgccataatagcatctgattttgtaattaaatcagaaacccccatccgaagaaccttctttcctttaaaacgttcttctccttcaatattgatatcattagataaaatcacacaaacagcttcttcaatatcctctaaacgaagtttattttcaattccacaaccaccttgagtttcaatacatacctcaattccatatttttcaccagataagatcaatgcctcagctgccatatatgtatgagcaacccctgatggacaagctgtacatcccacaattttcattttttgcctcctataattcttcaaaatctaattcaatatcttctaaacaatctaattcttgagaatcaatatgatccatattttttctttttaaaacattaaccaagatagccgtgacaagcgaaccaacaacaaccccaataacatatcctaatttcccttctatcaccggtaaaacaattaaaccaccccaaggagcatgatttaaaacacctaataaaaaagaaataatattaccaattgctgccccaacacaaatagaaggaatgacacggataggatcattagcagcaaaaggtattgccccttcagtaatccccatacatcccatcaaaatagcagctttaccagcttctctttcttcaacgttgtactttttaggagccaacattgtcgcaattcccatcccaatagatggtgtacaaatcgcaacacctaccccacccattaaataaggtaatgtgtcaacttgtgtttgagcaaacaaagtagccactttattaatcggaccacccatatcaaaagctgtcatagagcctaaaattgcgcctaaaggaacaagtccaatatcattcatatgcgctaaccaacaggttaatgatgacatgacaaaactaattggttttccaatcagccaaaaaacaattccaccagtcaatagagttccaacaactggatacaagaaaattgcccctaaagattttaaagaaagtggtaactcaatctttttaagatagtttacaatcactccggcaataaatcctgccgcaatcccacctaaaaaaccagctccaacactcttagccacccatgctccacacatccctggtgctaaaccaggacgttcagcaatggaataagcaatataaccacctaatactggaataaacaaagttaaaccagcatgtcctatttctgataaaccacttacaaatatttgattattaacggttgactgagatattccttgaggattaaccatcactgataaagctaataaaattccccctgaaacaataaatggaatcatatgcgatgtcccagtcaacaaatgacgcttcacaatttttaaattttctctcatttttctatcctctttatgattgcattgtttcattcaaaaatctatagacatcttctttcgttccatttgttaaaatcatacgatattcatcatgcataagtttacgtgctaatgaagaaatcattttcatataaatatcattagcactttgcttcactgctgcaatcaatatgacataacgtacttcttcatgcgtcttttcatcccaaataactggcttatgtaatcttccaaaacaaagacaaggtcttttcacacactgacttcttccatgcggtaaccccatctcatctccaatcactgttgccgatattttttctcttttcaatacatcttgataaaattgtgatgcattatctatattaccaactttttcaagtttacaaactaacgtttgaatgacttcttcctttgtattatctttgatatcaaagataatacaatctttatcaatcaaatacatttaaataaatctcctctcataatccattaagacttcataagcttcttgacttgtttgtgatttgactatatatttcataaaatccgttgtcttttctaacttcatcagattaataattgctggaatatgttccttttgatctttactcgataaacaaaaaataacctgaatttccttatctccaaactttaccttcttttgattaataatcatactcattgctgtcttataaaccccaacttcacaatttccatgtaataaagcaaacttaccatcaacaataaaataaaaaccattttgttcaataatatcaaaaattgtttctagataatttctattcaccgcatatgattcttctaaaatatgacaactttgaataaccgcttcttcccaagtcatatcctgatcaatgatttgaatcacatcttcattcaataaatcagccaattgccctatctttttaggttttcctaaatcacgataacccaactcacgtcgaataacttctaaaacccgagttcgatcttcatcttttaagaaatctaaacttttattaattgaataatagttggataaaggagattttcttgcaattccagcattaattaaacaacgatcatctaactttgttaaaataggattaacttgtaagtaatcaatatctaagtctaattttgttgtggtaatgattttatcaacttgattaagattttgataagtagaaagcttatatttaggaatcgtatcaacaatctctacttggtattcactcaataatgattcttttaacattgtcgttgttccataaccatgtccacaaaccaataatattcttttacgctcattatgatgaatccgttttaagcttgccacaaaatgaataaccaaataagcaatctcattttcatttgtaatattctttaaaagctcaattcttttaataactcttattacaatttcaaaaatctctaaattctttgtagataataaagagacaacattttcatctacaacaactcctaattgaatacgttgtattaatggaaccatatgattaaacaacccttcaattaaaacaggatcattttgaaaaggaattcccatttcaatagacatttctgaaataaaacaagtcacaatactttctaccttaatcatatcaacatgttcttcataatccaaaaaacgattaagataattcaaataattaaccatcttatttttattcttttcattaataggtttattaaccaaatgctcgatatcttcaataaactgatctattatatttctatccgtttctacaaaggcaaaatcaaatactggaatttccttattctcaaaaaaccatatcatgcaaatcacatgagctacataccaattataagcctcatctcttaaagttaaatccatcatttctaacatatcatcaattaacataataatttcttttaatagaatttctggaaatgaaagcttaaaaatatctaaaagatatttttgataactattcaaatgatgagaatctttaattaaaagaatatatttttttaattcattaaccatcaaagcaattctttttttattatctccatttaattgaaagcattcatcataagtaattgttaatccttgttctaataaatatgtttcaatttcatcaaaatcattcttaattgtacttcttgaaactagtaaatcttttgaaagttgtgataagttgaattgttgactacaaaataaaagataaatcaatataatcgataatctttcatcatgtgaataaatatattcattattcacttcaaaaacttttattgaaaaatcttcaggtatttttaaaatacctttaccacctttcataattggagataattgattttcaattaatatttcattaattcgttcaatatcatatctaacatttctttctttaatattcaaagcttgttcaatttctttatatgttgtttgttgatattgtgataagtgtttgactatttctaacattcgagcacttattaacatacaattctcccattcttttatccttattataatcatatttattcatttgaaaagaaatattactcacaatatttgtaaaaaaaattacaaaagttacaaattgaaaagatagatattcgattatatactgtgacttgcagttataagtctttattcacttataattcaagaatatcaaagaatgggaggaaaaatgaaatggttggaattattcttgcaagtcatggggaatttgcaaatggaattttacaatcaggagctatgatttttggagatcaacctgatgtaaaagctgtgactttacaaccaagtgaaggtcctgatgacttaaaagctaaaattgaagctgcaattgcaacatttgaaaaccaagatgaagttcttttcttagttgatttatggggtggaactccatttaatcaatctaatggaattatcaatggtcatgaagataaatgggcaattgttacgggattaaacttaccaatgttaattgaagcttatgcttctcgtatgtctatgacttcagctcatgaaattgcaactcatatttgtgaagttgctagagatggtgtgaaaacacaaccagcaacattggaaccaaagaaagaaaaagaagaagttgtgacaaaacaaactgcaggagctattcctgaaggaacagttttaggtgatggtcatattaaatatgtactagcacgtgttgatacacgtctattacatggtcaagttgctacaacttggacaaaaacaactcaacctaatcgtattatcgttgtttctgattcagttgctcatgatgatttacgtaaaaagatgattgaacaagctgcgcctccaggggtaaaagctaatgttgtaccaattgataaaatgattcaagtggctaaggatcctcgttttggtaataccaaagcaatgttattgtttgaaactcctcaagatgcgcttagagcaatcaagggtggagttgatatcaaagaattaaatattggttctatggctcattcacttggtaaagtggtggttaataaagccatagcaatgaatcaagatgatattaaaacacttgaagaattaaaagaaatgggtgttacttttgatgttcgtaaagtaccagctgattctaaagaaaatatggataatcttttaaagaaagcaaaagctgaattaaaaaattcttaattgagggaggaaaattataatgtcaattattacaattattttaataattataattgccttactagctggtatggaaggagttttagatgaattccaattccatcaaccactagtggcatgtactttaattggtttagtgactggacacttaactgaaggtattattttaggtggttctttacaaatgattgccttaggatgggcaaacgttggagctgctatcgcaccagatgcagcccttgcatcagttgcttcagctattattatggtacttggtttagaaggtggaacaacaaatgttcaaactgcaatttctacttctatcgctgtcgcaattccattatcagtagctggtttattcttaactatgatttgtcgtacaatcgctattcctatggttcacttaatggatggtgcagctgaaaaaggaaatatccgtgcaatggaaacatggcaaatcttagcaatcttattacaaggggtacgtattgcgattcctgctgctgctttatgtattgttccagcaacagttgtgactgatgtattaaataaaatgccagcttggttatcaggtggtatgacagttggtggtggaatggttgctgctgttggttatgcaatggttatcaatatgatgtctactaaagaaacttggccattctttgctattggatttgttttagctgctattggtcaattaacattaatcgcattaggagcaatcggtgttgctttagctcttatttacttaggattaaaagaaaatggtggttcaaataatggtggaactggtggttctggtgacccattaggtgacatcttaaatgattattaaatcttgaaggaggaaagaaaaaatggcagaaaaattacaattatctaaaaaagatcgtttatcagttgcttggcgtcatcagttccttcaaggttcttggaactatgaacgtatgcaaaatggtggttggtgttattcaattatcccagctatcaaaaaattatatccaaataaagaagatagaattgctgctttaaaaagacatatggaattctataacactcatccttatgtatctgcaccagttatgggggttacattagctttagaagaagaacgtgcaaatggtgcggaaatcaatgaccaagctattcaaggggttaaagttggtatgatggggcctctagctggggttggtgatccagtcttctggtttactttaagaccaatcttaggtgctttaggtgcttcacttgccttaagtggaaatattatgggtccattgttattcttctttgcatggaacattatccgtatggcatttatttggtatactcaagaattcggatacaaagtgggaacttcaattgcccaagatttatctggtggtttattaggaaaaatcactcaaggagcttctatccttggtatgtttatcattggttctttagttcaacgttgggtaagtatttcatttacacctatcgtttctaaagttacacaatcacctggggcgttcattgattgggcaaaacttccttctggtgttgaaggtatcaaatcagccttaacaacttatagtcaattaggagcaactgctcttgatgaagtcaaagtaacaactttacaacaaaacttagatcaattaattccaggtttatcagcattattattaacattattatgctgctggttattaaagaaaaaagtttcaccaattgttattatcattgcattatttgctgtgggtattcttgctcgtttagcaggtatcatgtaattataaattgatgagattataaatcaatcaaggaggaaaatatatggttcaatctttaaatacaaaagtcgatttaacaattcaagctacttcttatttaggtatggctaattatggaaaagtaatggttggagatcaagcatttgaattctataatgaaaagaatcttaaggattatattcaaattccttgggaagaagttgactatgtaatggcatctgtgatgtttaaaggaaaatggcttccacgttttgcaatcgttactaagaaaaatggtaactttactttctccactcgtgataataaaaaaactttaagagccattaaccaatatattccatctgatagattggttaaatctctaagctttttccaagttattggacgtggattcaaaggaatctttagtaaattaaaatcagccttataacaggctgatttttttatacacattatccttgtgcttttttctttaattcatttaataattcaatggctaatggtaaccaatgtccacttgttggaatcattattacaatttcatttttcatatattttaattgtggtttcttaaacaatcgatttacaagttcaaataattcatcaccagcaatatgagaagaaaattcttgcgttaacatgacttgaatataatcaccagcttctttcacttcatcaataaatggttcattacataaaatctcataacgacgtttcatgacaatgttattgacttctctaggcaattttccatacaaatctttcaattcattttctaactctgtcatttgtgataaatgttgtgctttataaacccgttgatataaatttaatttttcaatatcactctcaacgtaattttcaggaatataaccttcaacattaatattttgtactggaacttctttttcctctttcttttcacctgtcttttcatcaatcgcatcttgtaagattttcatatacatatcaaatccaacagtatcaataaagccagcttgttcaccacctaaaatatctccagaaccacgaatagataaatcacgcatagcgattttatatccacttcctaattgagcaaattctttaatagcttttaaacgtttagaagcttcttcattcatttgcttatttttagcatacaataaatatgcataagcgactctttcgctacgtccaacacgtcctttaatttgatacaattgtgataatccaaatttatctgcatcttcaataataatagtattggcattaggaatatcaattcccgtttcaatgattgttgtacataccaaaacatcatattctttatctgtaaattcttgcatcacatcttccaattgatcccttgacatctttccatgtccaattcctacacgagctgatggcaccattctggcaatatgattagccacactttcaatattagaagttttattatagagatagaaaacttgtccttttcttcctaattctctttcaataacttgtttaatgagttgctcacttttttccatcacatatgtttgaactggcatacgatttaatggtggcgtttcaatttgtgataaaccacgaattcccatcaatgacatttgtaaagttctaggaattggtgttgctgttaaagttaagacatctattgttttacgcatttctttaatcttttctttttgacgaaccccaaagcgttgttcctcatcgatacataataaacctaaatctttaaattcaacatccttagataaaatacgatgtgtcccaactaataaatcaatctttccggcttttaaatcagccaaaatttgctttctttgttttaaagttgtaaaacgattcaataaagcaatattaactggaaagttctcaaaacgctttgtcatcgtatgataatgctgtgaagaaaggattgttgttggacataagaaagcaacttgtttattagctaaaatagctttaaaacatgctcgcaatgcgacttctgtcttaccaaaaccaacatccccacaaagcaatcgatccattggtctaggtaattccatatccgccttaatttctttaacagcttcttgttgatctggtgttaaatcataaccaaaacattcttcaaattgaatctgcatagcatcatctttgggataagcaaagcctggctgtttcatacgttgagcataaagttcaattaatttatcggctaaatcatcaaccttatttctcactctttgttttgtcttttgccattcagtactatttaaagcatgaattttaggaacttttccatctcttgaggcatattttctaactaacttaaagttctcaactggaatatataacgtatcatttcctttataggcaatatacaaataatctttcttagaacccttaacctctaatgttttaattcccatatattgaccaattccatgcgtatcatgaacaacataatcaccaatattaagttctgtataatcattaatgattttcgcatctttatatttgatatatccctttttcttttgggaattgactttaaataattctgattcagtcaataaaacaacatgctcatcatagaaatcaatacctgtttttaaatttcccatatagatattgataccatcataaatattctcatcatttccaaccattgtataaggaagattatgagcttctaataactcaatcatcatttgaatttgatgattattatctaaacacattaagattttattttgaatcaaataatcttttaattgttgaatcaattgtttttcatttaataatgataattggacttctctagtaagaaacgatatctgtgaatcttttgtcctaaaatcaataaaatcaatacgtctactttttaataaaggatcaatttcagcaaataaagataaatcctttaccattttcccaattccctgaagttcatgtgtatagaaaaaagattcttctacatattgatgatatacagatttaatcttctcataactagaagtcatcatatagacatcatcaaaatatgaaagtaaagttgttgaagttgtaaacagactcatatactgatacaaacgtgaagaagcatcatgagcttttaatgattcaatatcaatagaaatttcttcttctaaattatcctgatattcatcacagtcactttgatctttaagcatttcaatttgttcaataactccttttacttcatcatcaggatataacaaatctgttgctggtaagattgtaacttctttcactctttctaatgatctttgagtatttttatcaaagaatcttaagctttctatttcatcatcaaagaattcaatacgaataggattatcatattgaatagaataaacatcaataactccaccacgttttgaataatagaaaggttcatcaacacgttgaatcatttgataaccactatgaataagtttctgtcttaattcaacaggttcaagaatcatcccttctttaagcattaaagtattttgtaaaaacaattcacgatgaggaatataacgcacatagctatgcgtatgacaaatcacaaccaatggttcattttgacaaattgctgataatgcattaattctttctcccatgatttcctgtgaagaagctaaagcttcaactcttaaagattcatcactggggaaaaagacaaccttattttttaagataggataaagttcctgatataacagttgtgcctgatataaactctctttaataatcagcatcggctttggtgaagcgaaaaaagcactagcaatgagaatcgcctcatcactagcgtgagatatcacaatctcgccttttccctttaataaagcaagataagctggattattttttaaaatctgaataatctttttcatctttgtctcctttaattaaaagcattcattgctgctacaaaatctttatctaaatacatttcaatcgctttaacagcattttcaataccttcatcaatgaatggttgttcatctttagtaaaacgacctaatacataatcaacaaccttaatatgaggatgtttatcaattcctacacgaatacgtttaaaattttgagtattcgtatgagcaatcacactctttacaccattatgaccaccagcactaccactttgtcttaaacgtagcttaccaactggcatatccatatcatcataaacaatcaataaatcatccacatctattttaaaataattcattacttgaataaccgactcaccagaattattcatataagtcatgggttttaataaaataacatcttcaccatgatatttgaattttacatactcacctttgaatttcttattatcaatagaaacattcaaaacatcagctaaacgatccataaccataaaaccaacattatgtcttgtcttttcatactctttatctggatttcctaaacctacaattaacttcattatgacacctccaaatagctttaatagtataacactattctcaacgaaaagaaagagtctatgattttttcatacactcatttcaattatcttgctaaaatagctaaacaaacaccatcaacttttaatttattatctacaatctttcctttttcactatgacataacaaagaaaaaccttcttctacatcaacttctattgtatttgttgaagcattaaaataaacaataaaatctttatattctccaatatcttgatgtaatgtatattctatcatacgatgatcaatattagctgtagatacattttcacgaataacttcataatcatcataacggaaacaacgattattttttcttaaatggattaggaattgaacaaattgaactgtatcaatttccatatccttacggttccaatccaaagcattcacttgatctcctgcattataggtattagattgtccacctttggttctaaagaactcttgtccactatgaataaaaggaacaccttgtgacaagataactgccgctaacatcaaacgtaaacgttttttcttcacttcttcattttcatcataattagagatttgtaatttatcataacatgttgcattatcatgacattctacatagttgatagattgtgaaatattatcaaacatttctaaattacaaattgctttcattgcatcatttgtcttatatgtatctcctgaaaaataaccttttgattccatttgattggttcctcttaaggtatctctaaagaaatcattaaagaaaccaatatgtggtgtttgacgattattttgaattgtcgtacgtttttcttcactcaatgctgtcatcatattccatccttcaccataaacaataaatgaagaatcaattgccttcccttgagcatctacaagtttcattgtctcctgatcaataatacccatcaaatcaaaacgataaccatcaataccataaagcacttgccaacgtttacacatatctaaaatatatttacgacacatcatcgccgtagtatttaaatcattcccacaccatgaaccattagataaactaccatcatcatttcttctaaaataataatgcggaacagttctctctaaagcatttaaattcacatcatgcatatgattataaactacatccaaaacaactcttaaccctctagaatgtaatgcatgaatcatttgttgtgcttcctggatacgtttatatccatcatcaggatcagtgacataacttccttcagtcacattataacctgctggatcatacccccaattataaagttctgttggatttctttcatccacagtagcaaaatcattaattggcattaattgaacatgggtaattcctaaacatgataaataatcaagtcctgttggatttccactatctgttgatgtatgtaattcactaaaagccaagaattttcctttgtttttcattccacttgttgatgacatagaaaaatctctgacacttgtttcataaattattgcatctgttttatgtaataatggtggcattgtatgcctaggcataacaaccttatctaagtcaacaacaatgctacaacgtccatttgatgcacatgcataagcatatggatcaagtgagacttcataatcttccgaatgtctaatcatataaacatagtttgtaagttctaaatctccttcaacacttacattataaacaccttttaatcctcttttcataggataaagttgttcaacatcatctttatagatttttaaaataacatctgtagctagtggtgcccaaaccttaaatgttgtttgttgttgggtataagtattccctaaatcttcaccatcataataatataattcatcaaattctttacacaatgaaagtcttgaaaaatctaaaaaacaagataagccataagcatcaacaatcttataaaccttacccattttaaaagaaatgtgaaatgcatattcttgataatcaggattatcattactatttaatgcatctcctgttaataataataattcatcttcttcaaaatccttcaaataaaatttactgctgattccattataataattctttgaaagataaactctaatttcattaaaattcacagcatatgctttcattctgattgcagtttcttccatattccctaccctttcttaaagtaaaaaataaagattctatcgttatttctacctgcttttagtataacatattggattttaaaaaactatcaaagaatgtcattagaaaaaatcacttcccattgatcaaacgataaactattttcgcaatttcttcttctgatatttgattctcatcaaaaagccattgtttcaaaactcctaaacatccagcagatataaattgatattgataatccataaactcattatattcttgagaatatgtctctttatactttttctttcctatttctaaaaactctgttaatatttttgtatttccatgttcacctaaaataacaatacaaaaatccctattttctttaaaataatgaaatatatgttcaattgttgataaagttatttcattatgtctaatctgttccattaaagtctgattaaatccctctaacaattcatcctttaatttatccaataaatcataaatatctttataatgcaaataaaacgtccctctattaatccctgcattctcacaaacttctttcactttaatacaataaatcggtttcaccatcaacaaatcaataaaagctttttttatccatttttctgtcaccacaacacggtgatcaatattttttttcatcatttccacctctttttcaacatatattggataagtgtctagcaactgtcaaattggccatttctgatgattgaaacacctatacatctatactataatgcaattagaaagaagaagcaaatgaggtgttcattatgaacgaattatttattgtgactggtgctttgggtcatttaggcaatacaatcatccgatatttaatgaaacaaaatgttgaaatacgtggtctcattatgcctcacgaaaaatctccacacactcaacaagttcagtatttccatggtgatgttcgtgatttgaaaagtttacttcctttatttgaacacatcgaaaataaaaaagtttatgtgattcatacggctggaattattagtatggatgaatacattacgcctttgctttatgaagttaacgtaagaggagtacgaaacgttgtttccctatgtttgcaaaaacatgtttatcgtttcatttatgtaagttctgtccatgcattaaaacaagaagatggaatcataagtgaaacttcctatttttcatcagagctcgttaagggtggatatgctaagacaaaggcagaagcaacttctttcgtattgagcagtgtgaatttggggttaaatgggattgttgttttaccatccggaatcattggtccctatggtgattctagtaattaccttgtacaattcatcaatgattatattcactaccacttatggacatgcgtaaaaggtggatacgattttgttgatgtacgtgatgttgctatgggatgtctattagctgcaagaaaaggccgtgttggtgaatgctatattctctcaagtcaatactatgaaatgaaatcattacttaatattgtcaaacaaattcatgaaggtccccgcctagtcatggttccaacacttcttgccaaagcatgcttacctattatccagggcttagcaaagctaaagaagcagcgacctctctataccccttattcactttatacaataactcacagccatttcttctctcatcaaaaggctagtgaggaattgggatatacgacacgaccgatggaagtgacgttaaaagatacagttttatggttaacaaaaggaaagtcaaattgactttccttttaacgtttcactctatctaatttccaaatatcagcaacatattcttcaattgtacgatctgatgagaagtatccagattgtgcaatattaactaagcacatcttagaccatgttgcacgatcacgatataatgcatcaatttttgcttgagcatctaaatatgattcaaaatcagcgaacaagaaatattcatcatttctattcattaattcatcaaaaatcattctaaattcttctcttgattcatggaatgttccatcaactaaagaatctacaacacgtttaatacgtggatcattattataataatcccaggcattatattgaccatgttgtcttaaatcattaacttcattatcttttaaaccaaagataacaatattatcatctttcacacgttcagcaatttccacattagcaccatctaatgttccaatagttactgcaccattcatcatgaatttcatgtttccagtaccactagcttctttaccagctgttgaaatttgttcagaaacatcagctgcaggcataatcttttctgctaaagttacaccataattttcaataaagacaacttttaaatattgatttgtttctggatcattgttcacaacatctgcaacactattaatcaatttaataacttttttagcaaaatagtatgctggggcagcttttgctccaaagatgaatgttcttggataaattctaaactctggatttgctttcatttcttgatataagtaaataacgtgcatgatatttaataattgacgtttataagcatgtaatctcttaacttgaatatcaaagatactattcacatcaacacgaataccattgtgtttataaatataatcagctaagacttgttttctttgttgttttacattatagaacttaccttgaacaatagaatcatcagcataattcattaatttttctaattgttctggatgactaatccattcatttccaattgtttcatttaataatgcagacaattctgggtttgaataagcaagccatcttctatgtgtaatcccatttgtcttattattaaacttatgaggatataagaaattgaaatctttcatttcttgttcttttaaaatttgtgtatgaagtctagcaacaccattaacactaaagcttcctacaattgcaagatgtgccataaaaacttgaccatctttaataatcataacacgatttaataaatcatcatcatgatcactcacttgtttcacatatccaatgaaacgacgattaatttcttcaataatttgataaattctaggtaataatgtttccattgtagaaacaggccatttttctaaggcttctgataaaatggtatgatttgtataagcacatgtatgagaagtaatatgccatgcttcatcccattccatatcgtattcatcaataaggattctcatcaattcaggaatagctaaaactggatgagtatcatttaattgaataacattcttttcatggaaattacttaatgatggataaactcttaaatgatttttaacaattgcacgaattccggcagatacaaagaaatattgttgttttaaacgaagtgtacgtccagcaagcgttgaatcatctggatataagttttgacaaatatctctaacttcttgagcatattgtctaaagtctttatttgatggaatttcatcactaggttctgcatgccataaacgaagtgtgtttgttactgttgtattgtttccaacaattggcatatcatatggaactgctcttacacattcagcatcaacatgatcccatttaccagtttcttcattccaaacaacacgaccccagaatttaacatcaacagcatgctttggttttctaacttcccacatatttccaagctttaaccattgatctggaacttccacttgatatccattttcaatcttttgtttaaacaatccatattcataacgaattgtatttccaaaagccggataagataaagatgctagagaatccataaaacaagcagctaatctacctaaaccaccattaccaagacctgcatcagattcaagttcttctaattcatgaatattgatcccataatcagctaacccatcttttgcaatttcatagattcctaagttcatcatattgttgactaataaacgtccaataaggaattccattgaaaaataatgaatttgtttttgataatttgttttagtgaccatcttagtcattgcccagttaactgaagcataatctcttaccattgtttcaagaaccatgaacttttctgtaatatgagattcttctacagtacgtccatatgattcaataattcttcttgaaaactcatatttaaattcttcttttgttttaaacataatattctccctctactattttcttctcaattcaaatatcatacccgaaaatggagcaatgtcaactaaaattgaattttctttgtttacagcaggtatttttttagatttaattgcacgtttattgacgatattgctaccagtatagtaatctgtatcagtattaataatttctttataagttccttctactggcactggaatacgatatcctttatgagtattaccaacaaagttcataacacacactagaatttccccatctggtgcatatcttgcataagcaaagacactttgcttcatatcatcaacaactaaccattcaaatccttcaggataatagtcatattgatataatgctggatgatctaaaatcaaatgatttaaatcactaaaatagcggtggaatgaatcatgttgaggatattttagtaatacccatcctaatgctttcttttcatcccattctttatattcagctaattcatttcccatgaagtttaatttctttccagggtgagtcatcatataaagatacaaggccttacattgcgcaaatttttgttcattatttccccacatcttatcaagaattgttcctttactgtggacaacttcatcatgtgagaaaggtaaaatataattttcacgatagaaatacatcattgagaaagttaatttattatgtgtatctggatattgacgatagattggatcttttttaaagtaagctaaagtatcattcatccaacctaaatcccatttataatcaaaacctaaaccacctgctgatggtgctcttgtaacatttggataatcagaagaatcttcagcaattaacataacactagggaatagtccattcatatgtgaattcatacgtttcataaattcaatagcaccatcattaacgcctctttctttatttcccttccagtaaatcaaattactaatagcatcaaaacgaataccatctacatggaaataatgcgcccagaaatgaactgatgacattaagaaactacgaacttcttcacgtcctaaatcaaaataacaactatcccattctgtatatcttaaattaatatcaggatattcataaacatacccaccatcaaattgatgtaatccatgaccatcctttacaaaatgtgcaggtacaaaatccataataaccccaatatcatttttatgacaagcattaataaatgccatcaattgttttggatttccataacgacttgttgcactaaaatagcctgttgcttgatatccccatgaaccatcaaatgggaattcaattaaaggcattaattcaatatgagagaaaccattttcaacaacatatggaatcaattgatcaatcatttcctcatagctataatattcaccatcttcttcatccgtaaaatctttcttcattttccatgaaccaatattagcttcataaatatttaaaaccttatcaaaattctttgtacgtttatttaaccaacgtttatcagcccatttaaaaccatcaagcttatatacttttgaagctgttgctggacgtaactcactaaagaaagcataaggatcagcacgatctacaattgaaccattaggtgtttcaatacgatatttatatgtatcatactgttttatttttggaataaataaagtaaaaattcccccatcagtatatctttccatgtaatgattctcaccattccatttattaaaatctcctactacttgaacgctttttgcatttggtgcataaacactaaagcgtacacctttttgaccatcaacttcatcaaagtgagcaccaaaaactttatacatttctaagcaattaccttcatgaaaaagttgaatcaaaaaattatctaattttgccataataaaacccctttcatatattccattatacatgaaatgggctaaaaaagcattaatatttagtgattgatagaatattaatttagacaattttagacttttgtacaagaaaaaaatagtcttacgactacttatcttcaacaaatgcaataacatcatttggtgtacaatctaatatttgacataacctttctagagtataagttgaaatgcctttattgttttttatattatgaaaagttctcgcattaattccatgtttatagattaatgcataggacgttatatttttttctttcattgttttaaacaatggtgaataattaatcatctttcctcatcactacctttgctttattatcgctttttctagtagtaatgaatatactgaaaaatgtacctatataaatataagataaaagttacaacgctctaatgtaaaaagctgcattgaaataacttataaagctattttaatgcagctgtaactatacatctttttttatagaaggctatcccataaccaattgcttctctttgttcattaactttgattccttctagatatttcttttcaataatttgtcttgcaccaacttcactatcttttactatttcactctctttttgtgaatgtttacattctatcacaatgacctttctatctgctcgtcttggtttaataaaaatatccaatcttccttctccactttctttgtttgatgaaattccatattcctgcattaatccaacaagaaaaccatgatagaaggcttcactattatcgtagtagctgatatccttgaataaaatatcattaagaattgcttgcgcttcttctactttttgttcaagtaatgctgtgacaagctgaccttttctttccttggtatacatattaaaataatccataaatgagtttttataaatctgatagacttctttatttggaataaccaattcataggtattcatatcaatctggctaataactttcagataacccgtcaataatagaaagctatagacattatcctgattatccatctcctgataggttagatctaattttaaatatttaacaagtgattgaccttgcatcaacatttcaaattcatcatacatcacatcatcagcattcttgatataattgacaaccagttcattactactcgtattcgcccagaatgattctggttctggttttgattggatagtttttaaaacatattttaagacactccatggattatagatctctgtactaccaaaccgataaccatcataccattccttgacttcatctttttgttcaagaaaattatattcatttaataattcattcacttcctgttgagtaaaaccaaatcttgtacttgattgttcatccatgatggaataaacattaaaattattgagtcctgtaaagatactttccttagatattctaagacatcctgtcagaactcctttttctagtgcatcattagttttcaaagctgatgaaaagacattccttaagaaatcaaccatttcatcataataaccatttgtataggctgattgtaatggaacatcatattcatctataagaataatcactttttgttgatagtgcatataaagacaatgtgataacttcagcaatgcatcttgaagatcattcattgaacatgttctatttttgtacgtctttaagatatttttatcatcgtcatcaatatagggactggtataaagctctggattttttttcgtgatatcagatatcaaagaagcaaatttatcaatttgttgatgataatcagttcttttcatatcttttaaagtcataaatataacaggatattgattctgatgtagcattgtttctttatctttagaaacatttaatccatcaaatagataagcattgcctttctccttgtgagaaaagaaataataaagcatactcatgtttaatgtttttccaaatcttcttggtcttgtatataagacaagcttttcattcataacatcatttatcaattctgtcttatcaatataataatattgatcatctataatttccttaaagttttctattcctactggtatctttttcatgatgatgctcctttcctatgcttagccttttatttaattattgatattgttgttttggttatgactgtttacctctaattaagatacttctagaaccacagatttctgtgttcccaaaaatatctcttttcatttatattaataatcaacttctatttctatatatcttcattctgcttttgctttattataccacaaagtcaaaaaagagtactctgtaaattcaaaataaatatatttgcataaatacaaaaacgcacttttgtgcgtttttatgctcttacatatgcttttataaatttaattgtttcattatcattatatggacgaattgtatattctaaaactgcactaggaataataaaagtctctgcataatgtacaataaatggttcaaatgcattggttggactttccacaactgcctggcttccttcaacaaggttcaacatatggaaaccaagatgacaatcatgataagttttttgctgtgttgtaaatcttctcgtttcaatgaattctaattcatgaagtcctgttttttcttctttatagtcattatcattatgaatcatttgaatattattcacaagattttcttttacccatttggttgtacgatcccactgaatattctttgcaccatcttcaatatgaattggacgagggaggccgtctaatcctaatctatcccaatcccataatttaaaggtaaatatataaggcgtggcactaatttctaaaaccatacaattagctgatgaacaatgaattgttccagcaggtattaagaaatgatcatgttttttagcttcaaagaagtttacatatttatcagcatgaaacttatcttttcctgcttgagcagtttttaaatcttgaatcatttgatcaggactaatattatctttaagtcctaaataaacacctccaccatcttgacaatctaaaatataataactttcatcttgagtataagtcataccaaaatgtgatttaatatattcagtcaatggatgaacttgtaagcttaaattttgaccacccattgtatctaaaaagtcaaaacgaataggaaattctgcaccaaagcgacaataatttttcattcccaataattctactggttgatataacactaaatccatagcaggaatttcaattcgcgtttgtccatatcttaaatacaagctattttcctcaggaaccccatcaaaactccaagcataattatcctgcttagaatctaacccacagacttccttcatccattgtccaccccatactccaggatcaaaatatggaaccaaacggaatggttgcttagcaatttgttttaatccttctcttaaagcttctccagtaatcatttttggttgatttttgatattgctgtcaagaagataatcaatatcatcaaacattttcattttttgtttatctgcaatacgccattcaataaagaaacctcttttaatttttcttaatgaatcttcatcattattatcctgcttaaaatttggcattcctttacgataacgacattgaatttcccagcgtgctaaatcacaataaatataaatatcacctcttgaaataagacttgcacctactccataaataaggatccttccatgtgactttgcaacttctttcatcgcttctaattttttatcatcaacaaaatcttccatttttccatagtacataaccccacgtacacgatcatcggttaaatgagaagccatcatttcatttaatttatctttatcataaaagatatcttcacttcttatcacaaaacgtggttcataaacgtcttgaatcaaatctagaatttcatcatctacaccaggataacattcaactgtcaaacaaaaatcttcataacttttataagtcattattttttctttaatttgttgttgattttcaaaaacatcctcatcaaatccaataatctttgtttcaggatatttatcataattcatctttctcattcctatctttttataaatttcacttcaccatttcttttaaaaactctgtatctaaattcctttctttcaattgcttggtaatcatgaccagctgcagtaggccaacatgctcctacctttaaatcagtttcaccaatattaaccaagcgatgagcaattgttccagcaatatgatgtaaagatccctcatatactttttcagcccaagtctcaccatcttcatccatcaataacaatagcccttcaccagcaatcccaaaataaatttcagcacaatctttattttcatgaaaatgtccttttgtcatattacattcatcaaaagaataaactggtttcaaaacagttaatccccactgtaaattacccaaaatattttctcctttgctatatgaatagacctcataaacaatcggatcatcttcccttggctgttcataaagatatgcaacctcatgatattttttactatatttttctactttttcaccttcaataacaccatctgcaatatgatgtataacttctggttctatcactttcataatcttctccttttatgggataaaattttcccatatttccatagcaatttgtggacgagagacaaataagaatttatctggattgtcgacaaattgttgataaataggtattcccttttcaatctgaaattcttcataaatacgtggttccttaattataagctcactttttttgtaattttcattagcaataaacttgatttgattcccttcaacaactggaaaccaggcaacaccttgatgtgctctaacttcagcataatcaaaaccaaaatctctcacacaccaagctccaaaagttaaattctcttgaagattagcaacaatcgttgcatgtgcccaacctggtggaacaatcacaacatcacctggtttcgcatgcaccgcataacatttcccaggattatcatgagctgtttgttgcatataaatataagcttcaccactccatatttcatagacttcacaagttgacattccacacgactgagacacagcatgaatgtgtccctgtgaacgaactggttcttttcctattgttccttttgcatatgtgactgcaccatataaaagatttctttcaagcatagcttgtttatcttgattattccctacatccatcgcaatggaatagacaatctctggaccttgactttgtggatccataagattctgtctaattgcctccaatgttcgattttcaacaattggtccaaataccccttgtccatattcaaatcctaaaggattatatgtaggaataatattaaatcctggattatatttcatagtctactcctctacttgaagttgttcatcttttaataattgcttatcatacatttttacaaaaggaatgtaaatcaaagtacctacaataaaattcacaagttgaactacaacacccataattgaacctgttgctaaatatccagaaataaacggtggtgttgtccaaggaataacagcacctgttggataaggacataatccactagccattgcaccccaagtaattaagacaaagacaaccataaccaatacccaaggaattaaaagcataacatttaaaacaactggtgctccaaatacaactggttctgagatattgaaaatagctgaacccactgaaagttttgcgactgatttcaattgaacactttttgatactaataaacatgcaataattaatgatgtaaattgaattggaataaatacatcatggaattgtgttgtaaaaatatactctggttttagtccggcttgtgtagctgcaagattggcaaacgttgctgcttcccaaactggtaaaataacagcttttgtaatactttgaccatgcaatcccataaaccacattgtttgaataaatataacaatcacaatcattgctggtaaacttgctcctaacttcatcaatggtgtttgtaaaacatcaaagaataaagtatgaacattgccatatggagtaaatgtgaaagcgtatctaataatagcaaatacaaggaatgtaataaatgctggaactaatattctaaatggagctgcaaccattggtggaacactgctaggtaatttaattgttaaattcttttttaataatgtattgaaaacataacctgataagaaaccagtaattaaggcaacaaataaacctttaccacctaaccaactcataggaataacattagtaattaaatctttaacaccttcgacttctaatgttaatggggttaaaatcaagaaagaactgattccaacaatcatcgcaaataatggttctgtcttttcttctttagcataataataactgacaactcctgctaaataaaaggcaaccaaacttaacgaaacactagaaataattcccaataaacttcttacttctgtcataattgctgctggaacaacattatcaataaatgggaaactattaataatcaaaacgactgatcctgcaattgttaaaggcataattgctaacattgattttcttaaaatttgcaagtacttattacttgacaaataacttcctattggtactaaatacttttcaagaactttgtttaatttatccatatttctcctcctctataaatgttataacattacaatattattataacacaacatgttatgaatgcaacacttttatgttagaatgttataacatttaatagaaaaataataacttccctttcaggcagttatttattactttaaatcaattactaattcatatccatttgcaacatattgtgaatatgtatactcaataggtaaatcattagaacttcccattcttgtacgattcataatagcttcatttttctttgcgatttgaaatagctctttttgttttgtactcatcaaagtagccgttattttctcttttacatgtgtaattggatatcctgcttgttctaatttagcatacatagaaccactgaaatcagtcttttcatctactggaacaattggattaatataagtttcataatgtgtaacaggtttttcatcaacataagtctgtcttgttaattttaaaacaggcacattaactgaaattccaaaataataagcaacatcgattggtggagttgtatattcaactccaataacgcgtcgatcattattattatttgtttcttttacaccattaaaagaagattgaaaagaagttgcaactgtattttcacgttttaaaacaatagtcccttttccacgctttctagaaataagtttagcattaatcaatttatccattgcttgacgcactgtgactcttgatactccaaattcttccattaaagacatttcactaggaagaacttctccttctttatattctccatttaaaatacgtgattctaatatatcatagagttgactccataacggcttttgaccactttgaaaactaagtttcatatcttcaccccttttcacttctgttaactttattatacactaattattccaatttttgtgaaattaatgctattctgattcaaatccattatttaaagtcacttgtttaaaccaatcagcactttttttcttctttgtttcaccagtttctaaatcatattcataaaaaccataacaattcttaaattgattagatggtgaccataaatcaataaaagaccacatattataaccttttaagttaactccatcttgaatagcctgatatgcccaaattaaatgctttttaacataatcaatacgataatcatcttgaatttgacccgcatgatttctaaaacgatattcatcttgaatccccataccattttcagtaatacgcatttcaggattcccatatttttctttcattaacattaatgtatcatagacaacttttggataaatttcccaaccacgatctttattcatttgtctaccatgcatttgatattcttctgtaaatgaatcaaaagtgataggagccttaggatttcttacataatctaaacattttactcgtgttggatgataaatatttaatcctaagacatcaattttattttctttaatcaactgcaaatcaccatcttgtatttcaataataacatgatgttcttttaaaaaggctacccattcttcattaagaactccagcaagtaatggatcttcaaaacataattgagtcatcagatccagtgtatgtgcggcctctaaatcgccagcattttgacttcttggatagatatgctgatgatttaatacggaaccaatctttccattgtattgaccttctttaaaacatttaacaaccattgcatgagcaataaccatatgataaatagcttgattagtaagattaaaatcaattttattaggataacacatatctcttaaatatttaattccaacatcaacaattggttcattatagatataccaaatatcaaccaacccatcaaataattcaaaacatttttcacaataataaacaaaagaatcaatcacatcacgattcgtaaatccaccttgtttttcaaataacaaaggcatatcaaaccaatataaaacaattgataattccattcctctatccttaaaagctttaaacatattcttataataagtcacagctttttcattcactgttttcccatctggtaaaagacgtgcccatagaatagaagttctaaaactattatgttcaatattttgagcaagttgtgcatatttttcgtaattttcataccagtttaatgtatcactaggtccaatttcattataaaagcgttctggtgacaagcgatagtattcatcccaaactgtaggagctttaccatccttatcaaaagccccctcagttccttgagcccaaacggctgagccccatttaaaatcttgtggaaattcgtatttcatttttatcttcctctcataatgttaattttgttgtaatgttataacattatgattacaatataccatatatattatttttgtcaatatagaaaaagatattatgtttatcataatacctttacagtaaatattttccaatttcttctctaatatgaacataatcactttgcattgattcatagatttctcttaattcctgagaatgttgtcttgtattcattaatatttcttcttgatgttcgacaaaagtatcaacaacttcctgagaaatcaaaccatctttagccatctcacaaataatcgacatagccttatcaacacttaaaggatctttataacttcttcttcctaataaagcacttaaaatgtctgccacagcaacaatacattcacttaaagacaaatcatctttcgctaatccataaggataaccactgccatctagtttctcatgatgcctaattgcaatttgtaatatatcatcaggtacataaccacgtaataccttctcactacctaaaacgtgtccctgcataatctgcatttcttcatctgttaacttgcctggtttttctaatattttaattggaatcgaagcctttcccacatcatgtaataatgccccataataaatcttttgaatctcatgctcacttaaatcacagaacttagcaatttcttgggctaatgatgttgtcataatcgtgtgtataactgtaaattcactattaaaatcaattgaataagccaacatacataaatacatatgtttttcttcttgactaaaaatatagcgactaaataattcatccatatcttgatgatattcaccattgaatattcgttttaataaacgattatcttgatttaatctaaaaaaggcatctatatgatcttgttgaaactttccattttttaactgacttttaaaataatcatcaacatttttatgactttgtaaaagtacatccatacgatcacaaaaatgaatcaaacttgccaagtctttattcgaacactcaatttctaataatttattataatctaaatgatgaaacaatatacaatcagcatgttgcgacaatggtgacattcttgataaaaacaagtatccataaatagcatgttcccaaacatcatgagattcaaaacttaataaattatctatttcatctgtcttataggcaccaatatcatgaaacaatgctaattttgctcctaaaaagatatcatcttgtgaataaccaagttcttccataagctttgtcattaaaaatgttaccctttcgccatgattcactagccgattatccattaaatccaacatattacggacgatttgtataacatccttatcccttaataaatccacacaatccctcttttctcatatagaatcattataccaaagaaccttcacaaagcctacaaaaaagacttaagaaatcttaagtctattttacaataacctcattaatatccttaacaacaattgaatatgtaccatcatcttgttttattttttcaactcgattaccagaaagatattcctcaattggtagttttacttcaatttcatcatctaacaccaacttacaaatatccattgctgctaatgataaactttgaatttgatcttcctcaccaattcccaaatccttcatcataatttcactttcttcttgagcctgataatctttttccaatactttcttaacaacctctaatggtttaactggttgattcaaatcaattttctcttgaatttcttgtttcattaaaggtaaagcttttccatcattaacattataaatatcatccattttcttaataacctttttcattgttgatatcttttgtttatcagttaatttttcttcacctttaatccattgtggatttaaataaaaatcaggtttcccatcaatcgtatatttcttttcaattaagaacaattgtttttgatcacaattcataataattgcttcatccactgctgaacccatcattggtaagacttgttgcttagtaatacgaacatttccttcttccacaacactcataggaattgtacgatagtttaactttaaaactgccatgtatctttcaccatttttataacaatcaacatataatacgttactattaggcatttcttcaataacagctcctaaagtaaataacttatcagttatttcatgtgcttgtttaataaattcttcatcactttcaatcatcttttcacaacgtaacatcatttcatgtagtgaacctactgttaattctttcatagttggagaatttaaagctttttctacttttttacgatagtaatcaattgaagtctcattcatatcaacaaaattttgtgaatgatagattttacgatgttcaaagtccagcatatgcattaatattttatttataattatagtattcatatttttcacccgcaaagattatatcatatttctttgcgtattataagttttactttataatattgtcgaggtgaagtttatgaaaattgttattgcgccaagtaaaactatgaaaccacaaaaagttgattggtctttgacccctatactctttgaaaaagaaacaaactatttacatcaacaactgagtcattacaatgatgaacagctttgtgaactcatgaaaatatcctataaacaggctctaaaagtttatgattattatcatcaaaaacaagctagttaccctgctttagctttcttttctggaacagtatttaaacaacttgaactttctttatatccacagcacttatcatatcttgagaatttaagaattctatgtgcttattatgggattttaaaatataataccgctatttcttattatcgtttagatatgacaatgaaacctaatcatatcaatctatatgaatactggtatacccctatctaccaacactttgaaaatgaagattttattatctctcttgcaagtaaggaatttaccgatatgttacatcatccccatgtttactttattgattttattgaaattgaagatcaaaagcttaaaagaaatgctatgattataaaaaaagctcgtggtcaaatgttaaatcaaatgattttaaaagaaataacaactttagatgaattaaaacaattacaaattgatggttttatttataatgaagcctataaccaagaaaatacccttgcatttacaagggtaattgaaaagagattcaaatgaatctctatttttttaaataaggatattgcatactttcagcaatcttttcagatgattttcccattttttctaaaattgtataagcaaattggaatgaagctgcaggtccacgtccagtaataatattttgatcaacataagtcaatgtatcttgataaatacctgaaggaatttctttatcaaatcctgggtaacatgtatattttttaccatctacaactccagctttctctaaagaaataggtccagcacaaatagctgcaatccattttcctttttcattgaaatccttcaataaatcaataactctttcatcatcatgtaaagatcttgcacctggaagtcctcctggtaaaacaacaacatcagcatcataagctgtttcatcaaaaagtctatccatactcacttcaataccatgtgaacttgtcactctcatagcatccataccaactaattcacaattcatttctccacgtcttaaaacatcaacaacacttaaagcttcaacttcttcaaagccttctttaattaaaactatagctttcattttcttcctcctaacatgtctttcatttatcttttttattatataaccaacccattaaaattacaatttatttgattcattacttccttccataaaatctataatctcatcaatagatactggataaaactcattagcatcaacacctacatcatatcttcttatccctttacttctcatcaattcattataatctctatgattatgctgatgtccatgaagatgaatcccaccttgaaaataatgcggccactctaataatggataatgcattaaaataaacttctgtttatgatatttaatgattttaaaatcacacacttcatcaaacaaagaaacatctatattcttatcatgatttccttttattaaaatcttatgaccatgaagttgttttattatattatgtgcctctaatacattcatcttaaaggtaaaatcacctaaaatataaaccgtatcattattttgaattttctgattccaatgatgaatgaaagtttcattcatttcctctacatttgcaaacggtctatctatcagcttgataatatttttatgtcctaaatgtaaatcacttgtaaaatagatcattatttatcaccttttcttaagaaaagaactatcaaagatagttctaccaagttaacatcttatctcttttatcaacactctttaaagaatcaataaattcttgtaaatttacaatcttttcttttgtttttctttgattagcaatagaaacattagaattatcacttaagagtgtcaatggaatttgattataagttatatatgcattaacaatttcatatgttttttcttttgttgaaagatttgttttttctaaaatatcacctttcaataacattgaataagcatagtgagatattatattttttgagccttttattaatttatctttaccatttggccctaatggttgtatatatttagaaaatgtttgattcgctgacaaagtataatctttaatctttgttccttttgtcacttcaatgtcatatttttgatattttgaagaagatttctcttgggatattgaatcaatataagttgaaacaataggtgtatcttctaatacaagtttcattgtatattgtgcttgtttctctaccggtttttcttgttcttgttttcctagcaataaataggatgcacataaaaaaataccaaccattattgcaaagataagaacttgcgcttgtcttgttaatttcattgcattcaccttctttgtcatattttaacatgttttttaacaatacacaatcaactacacattttattgattttatgttatgataaagtggttaaagaaggtgaaattatgatcgacaaaacacatattgtcaaaaacaacaaaacaatgctttatatcacttatactatcttattagcattcgttgtatttaactacaaaacagttttatcgactattggttatatattgtcgcttgcgacaccgttatatattgcaattgtgattgcatttattttaaatattccaatgcgtaagattgaacatctctatggtaagaaaattaaaagacatggtttaaaaagaggattatcaattgcgacgacactgattctagcaataactcttattgttttattttcttcatttattattcctcgtttaggtgaaagtattagcttgattatctctaatatctttaattattctaatcggttggttactttaatcaatgatgctttggctcagtttcatgttaattatgcaattaattatgaatctattcaacaagcattatctagtttagatttaaatagcttattatcaaagagtggtaatattttaggaaatgcaggtattaacttaatttttcaatctattggtatttttggtttctttattaatgctgtgacttcatttattatgtcactttatttactggctaataaggaaactcatttaagacaattaaagaaaattgtgactttcttatttggttataaagaatcattagtaatttttgatattggtgctgaagcaaatcattattttaatggatttgtttctggacaattattagaatgttgtattctcatgtcattaatgtatgttggttttaaattaactggcttaccatttcctgaattgttagcttttattattggtgtttctagcttagttccaatgtttggtggatatgttggttttggagtaagctttatcttagtattagctgttgaatcaacacaagccattatctttactatttgttttgtgattattcaacaatttgaagctaacgttatttatccaagagttgttggtggtgccgttggtatttctggtttatatgttttattatcattagtcttatttggtaatatctttggtttctttggcttattaattgctgtcccaagtatggcattaatatatgctgtaggaagtcgtgttattaatatttcactttatcgtaatcatatcgaagtcaccgataaatcaattaaaaaaattaaagatccaaaataaaaacagcatgcgctgttttttattttatccaatgttgaataatagccctagatgaacgattcatttcttctctaaataaagcgtagaactttctttttgcaaaagctctaatatatttttctagatcttcaccactttttccagtttgtttttcaaacatttgaatcgtttcttcagttgttttttcacgataacaatcaacactcaccatatcttctaatgcaaaacgagttggtttctttctgttgatttgagaaggcgttggctttccaaaaacaaccatacataaaggaattgcatattgaggtaaatgaagcaattcttgattagcttcaaagttttctaagatatctccaatataacaacttcctattcctaacgactgtgccgctacaactgcattttgagccgcaatcatacaatcttcacaagctaataataaatctgattcttcaatttttacttcttcacttgtatagtgttgaaaaatgtcaaaccatttttgataatcagctaagaaaatcaacactaatggtgcttttgcaataaatggctgatggtcacaacgaatagctaattcatcttttaacttttgatcttgaatatcaataattgaataaagtgccatatttccagcagttggtgcttgtaatgcagcttgtaatatcatttctttttcttcatttgttattggttgatttgtgtattctcttactgatttacgttcccataattgttttattgtctcattcatatttataactcctttttatttcttttattatatcattttatctcttttaagcataagaatatcttaatttttaagtgatatgcatggcatatattgaataatccatgtataatagtgtgtagacaagaaagtgagggattttatgaacatacaagaaagatttttgaaatatgtgagctttgatacacaatctgatcctaaatcttctttgacaccttcaacattgaagcaattagaacttgcacgttatttagttgatgaaatgaagggtttaggaattgataatgctcgtttagatgaatttggtattgtttatggtacaattccatctaataatgatcatcaaggcccagtcattggatttattgcgcatatggatacatctcctgatgctgctggaaatcagattcatacacaattgattcaagattatcatggagacacaattgttttaaatcaagaaaaaggattagctttagatcctcatgaatttcctgatttattaaatgttattcatcatgatttgataacgactgatggaacaacacttttaggagctgatgataaagctggtgttgcaattattatgcagatggctgaatatcttttaagtcatccagaatttaagcataatgatattcaaattgcttttacacctgatgaggaagttgggcgcggaacagagaacttcgcacttgaacaattcccagctgaatatgcttatactattgatggtggtaatattgaagaaattgaatatgaaaactttaatgcgtttagtgcagttgtagaaatcactggaaaaagtattcatcctggttctgctaaaaatgcaatgattaattctattcatatagcacaagagtttgatgctatgttaccggtacatgctagaccagaagcaactgaaggttatgaaggatttaatcatttacatgatattcatggaagctgtgaaagaactgttatggaatatattattcgtaatcatgatttagatttagctaaaaagcaatgtcaggatttcaaaaatgttgcggatttcttaaatcaaaaatatggttatgctatggttgaagtcaaaattgaccaaagttatttaaatatgaaagaacatattttagaacatatgtatattgttgataatgctattgctgcaatgaaggcatgtggtgttgatgctgtgagtgttcctattcgtggtggaactgatggtgctaatttaacatatatgggattaccttgtcctaatttaggaactggtggttttaatttccatggtccttttgaatatgtttcattaacaatgatgaataaacaagttgaagtcttattaaaaattatcgaaatgagtttgggggaataaaaatgtacgcaaaaaatacttggagtaaatatcaagatcaagattataaaaatgttatggattttaatgaaggatataaagcttatatttctgaaggtaaaacagaaagagcttgtgtgaaagcttctattcgtttagctaaggaatatggttttaaagatattagtgaatttgattctttaaaagctggtgataaggtttatgttgttaataagaaaaaaaatattgctttatttgtaatgggtgaaaaacctttagttgaaggaatgagaattttaggtgctcatattgattcaccacgtttagatttaaaacaaaatcctctatatgaaagtgatggttttgctttattagatactcactattatggtggcgttaaaaaatatcaatgggtaactatcccactttctttacatggtgttgttgttaaaaaagatggtagtgttattgatgttgttattggggaagatgataatgatcctgttgttggaattactgatttattaatccatttatcagcaactcaattacaaaaaacagctgataaggttattgaaggagaaaacttagatgttaatgttggaagtattcctttagatagtgaagaaaaagatgctgtaaaagccaatgtgttaaaattattaaaagaaaaatatgatattgaagaagaagatttcttaagtgctgaaattgaagttgttcctagtggaaaagcaagagattttggtttagatagaagtatggtattaggatatggacatgatgatcgtgtttgtgcttatacatcattaatggctatcttagaaacaaataatcctacttatacttcttgttgtattttagttgataaagaagaaattggtagtgttggagcaactggtgctcaatctttattctttgaaaatacaattgctgaacttttacatttatgtggtgatgattcttatttatcattaaaacgtacaatgacaaattcacaaatgttatcaagtgatgtaagtgctggatttgaccctttatataaagaagttaatgatgctaaaaatgctgcttatttaggtaatggtattgtctttaataaatatactggtgctcgtggaaagagtggcagcaacgatgctaatcctgaatatatggcaaaattaagacaaattatggatgaagctaagattcatttccaaacagcagaacttggaaaagtagaccaaggtggtggaggtactatcgcctatattcttggtaactataatatggatgttattgatgctggaattgcagtattaaatatgcatgccccatatgaaattgtatctaaagttgatgtttatgaaggatatcttgcttataaagttttcttagaaaattaattaaatacaaaaaaaccttgatttaatcaaggtttttttatttatataataaggtattaatctttttgaattggataatgacatgcgacaaaatgtcctggttttacttctttcaaagctggtttttcttcacgacatttatctgtagcgtatcgacatctacctgcgaaaggacatccagcaggtaaatcaattgggcttgggacatcaccacttaaaataatacgctttttctctttttctaattttggatcaggaataggtacagcagataacaatgcttcagaatatggatgcattgaatgtgaataaatttcatcacttgtacctaattcaactaagtgacctaaatacataacggcaattctatcagaaatataacgtacgatatctaagtcatgggcaatgaacaaataagttaaccctaatttcttttgtaaatcaatcaataaattaataacttgtgattgaatagaaacgtctaaggctgaaattggttcatcacatacaaggaattctggctcaattgccaaggctcttgcaataccaatacgttgacgttgaccacctgagaattcatgtgggaaacggttagcatgttctttatttaaaccaacaagttccaacaattcatgaactctttctttacgcttttcaggagtatataatccatggatttccattccttcagcgataatagattcaactgtcatacgtggatttaaagaagcataaggatcttggaaaatcatttgtgcatgttttgcataagctaaacgatctttagatttcttaatttgaacttcttgaccatcataaataatatgaccttctgtaggttcataaattcccataacaacacgaccaagagtagatttaccacatcctgattcacctactaaaccaagagtttcaccttctttaatttcaagactgacaccatttacggcttttaaaattccaccactgactctaaagtgttttgaaaggttatcgatttttaataaaactttatcttcagccattaagacttacctccttctttaggacaatctttgtgtaatagccaacaagcagcttcatgtccatcattcaatttaaagactggtggttgtttatgacgacaaattttcatacatttttcacaacgtgaagcaaatgcacaccctttaggtggatctaataaatcaggtggtgtacctggaatagattgtaatttgtcagatttattcgtatcatgttttggtaaactgttcaataatgcgactgtatatggatgagacgcattatagaaaatatcatcagctgatccagtttcaacaactttaccagcatacataacagcaatcttatcagccaaagaagcaacaactcctaagtcatgggtaatcaatacaattgctgtatttaattcatctctaatatttgctaataaatcaataatttgtgcttgaattgtaacatcaagagctgttgttggttcatcagcaattaataattttggattacatgaaagtgccattgcaatcatagcacgttgtctcatcccacctgagaattcatgtggatattgatttgcacgttcttcagcatttggtatttgtaccttttccaacatttcaatagccttagcatgagcttcttcttttgataaacgttgatgatgaacgatagcttcaacgatttgtttaccaaccttcatagttggattcaaacaagtcattggatcttggaaaatcatactcacttcttttccacgaattttttgcatatcatcctcaggagtgttaataatatcaatatctccaagagttaaacttccacttttaatacgtgcaggtggcattggatttaatttcatgatagtttgtgcagttacagattttccacatcctgattcacctacgactgctaaaacttctccttcatcaactgaataagaaacacctctaacagcttggacttcaccagcatatgtatcgaacgacacatataaatcttttatatctagaacttttgccattcttttttacctccttaacttaggatcaaaagcatctcttagcttatcacctaataagttaaaactcaacattgtaatactgataaagaacgcaggaagaattaattccaaaggatattgaacaaagaattgaattccttcattagcaagtgtcccccaagaagcttgtggtacttgtaccccaagaccaatgaatgacaagaatgcttcagtaaagatagcatttggaattgccaatgttaagttaacaataacgattgataatagatttggaattaaatgttttgcaataatacgtgtaggagaagctcccatactttgtgcagaaataacaaattcctgttcttttaatcgaataacttcaccacgcacaagacgagctgtaccaacccatccaaccattgcaagggcaatgataattgtacttactccaggcttcataacaatcattaagataataacgattaataagtaaggaataccattaacaatttcagcaatacgcatcatgatattatcaatgaatccaccaaaatatcctgagataccaccatagataacaccaataataacattgataataactgccataaaggcaataaataatgaaatacgagcaccatcccaaattctaacaaacatatctctacctaaataatcagtaccaaagatatagaaattagaacctgtgttataaaacattccaacatgtttatgtgctaaatccattttatcgattgtatgtggtgaaataattggcacaagaatagccatcaaacacataactaataaaataataccgaaagtaattgcaaccttatcacgtttaatacgtccaaatgcatccttccagaaactaatacttggtcttgtaatagattgcatacgacttgcatcttgacctacccattcaaattcagatggatcaatatcacaatcaggagatagaacttcttctacaataggttcttgaacgtttttattttctttatttttcatcctattatcactccttttcacttgctaatttaatacgtgggtcaataataccatacaagatatcaacaactaagacagcaagaattaaaaatgctccatagaataatgttgtacctgcaatcaacgtataatcattttccttaatagctaaaacgaagaattttcccataccaggaatactaaatacattttcaacaacgaatccaccagttaaaacagcagccgcaattggacctaaaactgtaacaactggcataatagcattacgaattgcatgtttccataaaattgccttttcagacaatcccttagctttggctgttttgatataatcagaactcaaaacatcaagcatacttgtacgcattaaacgagaaacagttgctagcgaactaaagcttagcgctaaagcaggtaatatcatttgattaaaattaccccaacctgtaacggcaaagatctgcgtgccggtcagctgattcaatttcaatgcacagaagtattgaagtaatgctgcaacaatgaaacttggaatagaaactccaataacagatagagtcatagcaactgtatcagcagctctacctctacgaatagcagcaactgctcctaaagcgacaccagcgataacagcaaagattaatgaaagcatccctaattggaaagaataagggaatgattccatgataatttgcataacaggtctactatatttaatagattgacctaaatcacctaccatagcatttcttacataaataatgaattgctctaataaaggtttatccaaaccatagtaagctcttaaagcttgttttgtaccttcatccattgccttacctgtactaaacggatctccaggcaacatatgcatcattacaaatgtcaatgctagtaatactaaaatagtgaggaaagcataaaaaagtcttttaataatatactttgccataatttcacacctttcttgacatttttcttcacattaaaaataagaaggactatatgtactatatcatatagcccattctttttatttaatttttgtaaatattcaattgtaattattcttcgatataagcatagttgaagttcatatcttggaatgctgttctaacaacaccttttaatttatcagtagtgataaaatctttttgtctgtcaaatacaacaccaattggacattcatcagctaaaatttgttcagcttttttcaatgtagcatagtattgatctttatcagctaatgaagatgctttgttaattaatgcatcatattcagcgttagaccatttaccatggttattaccatttccagtcatccacatatctaagtaagtcattggatcgttgtagtctgctgaccaaccagcaaatacgatatcaaattgacctttatccattaagtctaatctgctcttataagtaacttgtttaacttcaagtttaacacctaagttatctttaaattgagcttgtaagaattctgcttgtttcttagctgagctagtgtcatcacaaagtaatgttggagtgaatttagcaagagttaatccttcttcttttaatccttcttctaacattgcttttgctttagcatagtcaccatcacgagttaataaatcaccaacagtctttttgaattcaccattagcaacagctgcaggtgtcattgttgtagcaactggtgaagaattttgtaaaatactttcagccatagcttttgcattgatagctaaagtgacacctttacgaactttcgcattgtttaaacctaaatttttagcttgagagttgaattctaagtaccaaactccaccatcatcaaatgcttgtacgtttttaccatcttttttaagtgtcttagcattttcaccatctaaatcaatcatatcaattgtaccattgttaaattcattaacagcagtagtcatgttaccaatcattttcatagtgatcttgtctaatttaatagtatctttattccaataatcttggttcttttctaatactaagctatcttcatgagtccatgaagtgattttgtaaggcccattgtaagccattgttttttcagaagtaccatatttcttaatatcttttgcagctccagcatcattgaatgctttttcatttactgggaagaatgatgggaatgccatcaatacaactgcatattggaaaggtccagtgaatgttacttcaaaagtataatcatcttttgctttccatcctgcattagctaatgcttttttcaatgcagcatcatcttttgcgttaaatacatcttctgctcctgcaatttttgtcatccaagttgatgcataagcagcaccactctttttagtgaagtgtttattccatgcaaagacgaaatcttttgctgttacttcttcaccattactccatttttgtccttttcttaaatggaaagtgtaagtttttttgtctggcgaaacatcccaactttcagccataccaggttgtgcttcatcttttgcatctaaaacaactaacccctcaacacagtgtctcaatacgttcatagaaccagatgaagttgttaaaatagaattcatttcaggtggttcagctgttaggtttacactaatttctttgctgcctgatgaaccgtttgatccacaaccagttaccatagcaaggcacatcatagaaactgcaaccttttttacccaatttcctttcataccaattttctcctcctcattagataaaaccatagttaacatttgagtcgtcgttaacttatgtgcatctatcatatcacactattcaatacaattctagagtttttttacattttttatttttttcaaacgataaattatgcttttttcgattttccctaaaatttcataactttaaacgtaacttgtatacaaatattcagtcaaattagaaattctttttgttgtatatacattaaaaatctattcaatttctttattttttatgaattatttgtgtgatggacatgaatatcgaactgttgatatggaatttgaacgccttctttgtcgaatgcatatttaatttgttctaaaagatcatcttttaaatcataatagttttctgtctttgtccaaactcgtaatcctatcgtaattgcatgatctttatattcacttacacgaacataaggaataggttcttttaacgcataaggatgttcatcaatcactcttaaaataatcttttttgctaattcaacatcactatcataatgtacatccatactcatatctacacgacgaatatcttcgtgtgaataattcacaaaggttgatgaagctaattcattatttggaataacaaccatcttattatcaaatgtcattaaaattgtatataacaactgaatctcttgaatctttcccacatagttgcctacttcaatcgtatcacctttaacaaatggtttagcaaataaaataataattcctgaaaccacacccttcattgaatcttgtaaacctaaaacaatagctgctccagccgtagttaaaacggcgactaatgaagtcactgatacacccaattgtccaatcacagtaatcacaacaataatctttaaaccaacatttactattgattttacaaagttaataacaattggatcaacattcgattttttcatcatcttcgttataatatgtaataaaatctttgttccataccatcctataataaaaataaaaagtgcatcaataatattcatacctacatttgtatacttatcaatcatcttattaatagcgtcactcattttatccctcttttctataagatatagtttattgtttatttttaacaagtcaacctcaaattcttctcaataattgaaatcttttaagaaaaaactctataatatagaaagaaatataaatattattatccccaactataaaaaggttgcaatattttataaataagataaaatagtaatgtcaatttacatacaataattaaggaggaatctcatgaaagtcgcgataatgacggatagtaatagtggtattacccaaaaagaagcaaatgaacttggtatttttgttttaccaatgccttttactatcaatggtcaagaatttgaagaagatattaatctcactcaagatgagttctatgataaattaatgactggcgctgaagtttttacttctcaaccagccgctggtgaagtcactaagttttttgataatattttaaaagaatacgatcaaattgttcatattcctatgtctagtggtttaagtggttcatgtcaaacagctttaatgctagctcaagaagatgaatataaagaaaaagtctatgttgttgattcacaacgtatctcagtaactcaaaaatgggatgtacttgatgctttagcactttctaaacaaggaaaagatgctaaagaaattcatgatattttaatggataataaattaaatgcaagcatttatattactgttaatactttagaatatctaaagaagggtggaagaattactcctgcggcagcagctttaggaggtttattaaaaatcaaaccaatcttgactattcaaggcgaaaaacttgattcattccaaaaaacacgtaccatggcaaaggcaagtaaaattatgattgacgctatcactaaagatattaaagaacgtattgatgatagtgaagatatgagcaacacacgtattatgattgcttatacttatgataaagatcaagctcttgaatttaaaaaacaagttgaagaaatctttccaaatcatgaagtgatctgtgatccactttctttaagtgttgcttgtcatatcggaccacattcacttgcaattgcagcatgtaaaaaaattatttagtatgtaagtgagaatgggctaccattctcattcattttattataaaatgaagacgaagtggtatactatatataaacaaagaaagaaaggtgaaaaaaatggcagatatgcctcaaaaacgtccttctccaaagagaagaacaccctataataatagaactaaaaaaccgaatataaaaaaagataaccatcttgatactaaggtttttgctcttggtggattaaatgaagttggtaaaaacatgtactgtattgaacatgatgatgaaatcatcattattgatgccggagttaaatttgctgaagatgggttaccaggaattgattatgttattcctgattattcttatttaaaacgtaatcaaagaaagattaaaggattattgattactcatggtcatgaagatcatattggtggtattcctttccttttacaagttgtctctattccatttatttatgcttctccattagcttgtgctatgattagaagaaaattagaagaaagacgcttaacgcaagcaacaaagcttgttcaaattaataatttatatcaaattaaaacaaaacatttcaatattggtttctttaaaacaaaccactctattcctgaatctttaggaattgttgttaatacaccaaatggacgtgttgtctcaacaggagactttaaatttgatttaacacctgttggtgatcctgctgattatcaagttatgtcattcttaggtgaaacaggtgtaactttattaatgagtgattcaaccaatgctgaagttccaaacttctcaattagtgaaaaacaagttgcatatagtgttcaagaagaatttagaaaaaccgaaggtcgtttaatcgtcgcaacatttgcttctaacgttcatcgtgttcaacaaattattgatgcggctgttaaattcaatcgtaaaatattagtctttggacgttcaatggaaaacaatattcaagtttcacgtaaacttggttatatcaaatgtcctgatcgtttctttatcaaaaatgatgaagcgaaacgtttgcctgataacgaaatcttaattttatgtactggtagtcaaggtgaagccttagcagcattaagccgaattgctaatggaacacatcgtcaagtttctatcaaaccaggtgatacagtcttattctcatctaacccaattccaggtaatgctggtagtgttagtaaagtggttaataaattgtatcgtgctggagcgagagtcttaactaacgaagctatcaataatcttcatacttctggacacgcttcacaagaagaacaaaaattaatgttattgttgacaagaccaaaatatttcttccctgtccatggtgaatatagaatgttaaaaatccatgcaaaattatttgaagaagttggattaacgaaaggaaattcttttgttttatcaaatggtgattcaattttattaagagatggtgaagcaagacttggacctcgtattcatgttgatgatatctacgttgatggtaatgatattactggtttatcaacagctgttttaagagatcgtcaaatattaagtgaagatggaatggtttctgttcttatttcaatggattccagagctggatgcttattaaataaaccaattattatgtcacgtggttttgtttatatgcaagatagtaaagatatgataagagaagcagaatttttaattagtcgtgaattatctaaattattgaaaagaaaaacaacttttggtgaaatcaaaaatacaattagggatacattaggaccatatttctatttaaagacaaaacgtaatcctatgattattcctgtcattatgaataagaaagtatgaaaaagttcagaatcttaagacgattaatacttatattaatcgtctttggtttattattcagtggctattatacatatgccctttcaccaaaagattatcatttctctaattatgaatatgttaataaaaatttaaattcaaaacttaacggttttaaaattgcttttctttcagatattcatttaagcaatgaaaaaagcttagatcgtttttctaaaattattaaaaaacttaacgattatccttttgatatggtcatctttggtggagatttatatgatgaaggtgtttttgaatccaaagaaatttctaacctattaaaagatattgattgtaaatatggtaagtttgcaattttaggtgaaaaagatgaaactgatgctttagaagttactcaaatcttaaataatggtggttttgaagttttaaaaaatgaagtcagaacaatctattataatgatacgtctttttctttactggcttataatgatgaaattaatcctgatcaattaaaagccagtgataaatcaataaaaataggaattgctcatcaaccagatacttttatacaagcatcaaatacagtcgatttacaaatatctggtcatagttgtggtggctctatctatattccttattttggaccattacttccaattgatggagcaaagacctataatcatggtcaatatgaaaaaaaaggagccactctcctcgtttctaatggtataagtggtccttcatcttttccatataaagtttttgctaagaatgaaattaatttcattactttaaattcaagtaacacaagatagtgctacttttttgttccatattttaaatgatataaagcttccaagacttcaaatatgtatgtaattgaaaacttaccaatcaatgaatgatgattatttccaacctttaaaatcatatccactttatcactatatgcaaattcttctaactgtgtaatcacaataacataagcacctgtctttgtcagttctcgcattgcatcaggatgatcttgaaaaaatcctcctgcaattgatgaaacaataatcaaatcatcttttcctaaagatttaaagatttctttttgttgttctagtggatacattgccacacaatcttttcctaaataagataactctatttgcaattgcattgaaactgattgagtaaagaaattgccagcaaaacaaatatgctttgaagcatatattttatccacaatcttgattaaatcttcataacaaatattatcataagtatcttgtaaattatgaataacattttgaaaatgatctttaaagacttcttttccttcattaattgtttctttagctggtaattgatgatcaaacaataatcttttggtatcttgattaaagaaattcaaattcattgtgacatcatttttaaaatccgcaaaagactcataatttaatttacgacataaacgtgaaatagttgcagtggaaacataacacatatcagcgacttcagtaatcgtactatgcggtatcaaataaatattttgtaatatctgctttgctgcaccccaatagacatcatgcacatttgtcatattaataaagttaattaaattataaaatgcacttctcacttgggttggccctcctcatacttaataactgtcacttcaccatttgtcaaacataaacaatttaattgacctttatttccaactgccaatcccccatcaatagctatcttattatgataatcaggatcataccaaatatcaaaagaatgatcatcattaataaaacaacaaggagtatgaccgaagatataagtataatcaggatttgcttcatttaaatagaaatattctcttatccatgctaaaatttcttcactattttcttccaaaagaacctctggatcaactcctgcatgaaccaatacataatgtttatcatttaaatctaattcaatatagcttggtaaagaatcaataaaactaatcaattctttaataaacatctgttttaaatcaaaatattcctcataaggaatataatccttttgcagatattctctaatactattcactgtctttaatgctccattttgcttccataaacgataaggattcgatctttctgaatctaaatcattatatttcaaagcagcctgcatagattgtcgcatcattatttcatgatttcctttaatcatatgaatattatccatcgcttgtacaaaataataaatatcgatactatttggtccacgatccataatatcccctaaaatatacaattcatcattatcactaaagtttatcttttgcagcaataactgcaataatacaaactgtccatgaagatcagatataacaaatattcttttttccatatatcatcacccctttacattctaccataattattttttttaataaactaaagctcactattattttaaaaaaagtagaccccttaccaaaaatagtttatcattaaataagaaggtgatttttatgttcgatgagttttatttatcagtctatcatgatttcttttttcaatggattttattaaataaagatagctatttaaaagatcaagttatttgcgaagttcaacaacaaaatgataaattccaatccattatatttaccttaccacaagtaaaaggtattgttacaatttggtataatcatattgttgaagaagaaatatatcgtcaagatgatcaaatgatgttattttatttacattatactattacaaatcttaatcaatgtcgtcatctttttcaagaattctatcaaacgcttattaaatacagttatcaaagaatctataaaatcgctttatgttgtacgggtggattatcaacttttacttttgttgaagaaatgaaaaaagtatgtgaacttgaaaatgttcccttccaacttgattctctttctttagaacaattatatgaccaatatcttgattatgatgctttgtatttagccccacaaattgctcatatggaagcccaattattgatagaaacaaaacatcaggttcccttattttgtattgatcctactttatttgctacaaaagattatataggcattgtaaaatatatgaaaaaaacattaaaaatgctctcttgagcattttttagttaatcgatttataaatataatcttgatatttatgaatttgtttacgatctatatagaaagataaatagattccatcttctaaatattcttctttaatcatttcataagcttgtttcacttgactataaacttctcctttatcataaggaatatataattcaattaattcatagtctttaaagaggagctctattattttatcttcaagtaaatctaaatttattttttcttttacagaaataaaaacagctggttcttttggttgtaaaaaagcataacgatcttgatctaccttattataaacaaataacattggggtatctttaactcctaatgcttctaaaacattcaatgttgtttcaatttgtaaatcacaatatggagaagaagaatcaatcacatgaactaataaatcagcttctttcacttcctctaaagtcgaacgaaaagcttgtactaaatgatgtggtaattgattaataaaaccaactgtatcactcataatgatacgatgatgattcttaagctttacctgtcttgatgctgtttgtaaagaagcaaacaacatatcttcctgaaaaacttttttatccgtaaaataattcaacaaagatgacttaccactatttgtataaccaacaagacagacaactttttcctgattacgaatacgcaattgtctttgtgtttgtctttgtttcacaatcgctgctaattcacgctttgcttgaattaactcacgatgaatgattcgcctatcaagttcaatttgtttttcaccactacctctaaaaccagaacctccttgttgtgaatagagttcttctttcattcctgctagtcttggtaataagtattgatttttagcaatttctacttgtaattttgcttctttagtttgagcacgtgattcaaagatacgtaaaatcaagtcactacgatctgttacttcaacatctaaagcatctgtcaaatttttcacctgtaaaggtgttaattcttcattaaaaatgactatatcatcttcatccaacatgtgtttcaattcttcaaccttacctttaccaatataatatttaggtgaaattaaagaaagtttttgaatcacaacatctttaacttctatatggcaggcttcacttaaatctcttaattcattcatagatatatccagatcataatacatatgatcatattctacaccaacaagtattgctttcacattctcacctcttttctattataggagtcactatgaaaaaagccaactattattttacactttgcttagttttatttaccactatcttttcttttttaaatatgtttcaaattgttaaagtctctactaatgttattcagattgttttaaccaatcttttaccatcattactgccctttatgattttaatttctttatgtttatcattaggtttatttgaaatatttagttatcttattcaatttatcttttcaccattatttcatttaacaccacatatgtcatcattatattttgtctcatttttctgtggatatccaaccaatgctaaaattattaaagaatcttatgaactaggctatatcaatataaaacaacttcaacatcttttatctatcgcatccttttcttctttaagctttatctttgtttctttacaccttcctatcaatattgcctttatgatatatatcagtcatattcttcctagtatttgtaaagccttttggtataaacaagattatcaattgatgaatattcgcgaaacaatatatcaactaaaaaatccgcatatgaatttcgtttccgctttaaaacaaagtattacatcatctttaactgcttttatttttattttaggttatatgttagtttttcaatttgttggatatagcttagaaacattaattcataaccattttgttttaagtattattcaaggctttttagaatttagctctggttctattcaattattacagtatcaacattttttagtttatccttttgtaagtttttatctgtctttctcaggtctttctgtattaatgcaggtcgataatattcttgaaggaatcccttattctttcgcttgttattttaaagatcgttttattcatgggattttatcttttttgttatgttgtgctatacaatatttgacattttaaaaaaatgtgataaaataatagtaaccattattaataaggagggatgttatggcagaaccaaaattaagatactctaaacaaagagagacaatatacgatgtcttaaaagatgatgaaactcatccgaatgtagatacaatttacatgaatgttagaaaagtcatcccagatataagccttggaacagtgtatagaaatcttaatttacttgctgatcaaaaacgaattcttcgtttggatgttggtgatggggttgtccattttgacgcgagaatcacacctcattatcatatggtctgtgatgaatgtggagctattcgagacttattcttggatgaagcacttatttctcctcttatcgataaggtacaggatatctgtgacgaccagatacgctcggcggaaattttatttcatgggacatgtcgtcattgtttaaaaaagaaatcatagaaaggagggcatatcaaatgcctacattaaaaggaactaaaactgctaacaacttattacacgctttcgctggagaatctcaagcaagaaatcgctacacttattattcttcaattgctaaaaaagaaggatatgtacaaatcgctaatatctttgaagaaactgctaatcaagaaaaagaacatgcaaaaagattaatgaaattattaaacgctgaattaaaaggtgaagctttacatgttgaaggagatttcccaatcatgttaggaacaactgctgaatgtttaaaagctgcagctgctggagaaaatgaagaatggactgatatgtatccagaatttgctaaaattgctgatgaagaaggattccctgaaatcgctaatgtttgtagaaatattgctgtagcagaaaaaatgcatgaagcaagatatttaaaattattagaaaacttagaaaatggaactgtttttgaaaaggctgaaacagtaacatggaaatgtaataactgtggatttatctatgaaggaacaactgctcctgaaagatgtccagcttgtgatcatcctcaagcacactttgaagtttttactttctttaaagaataatataaaatcgagctgtcttaattgacagcttttttcttaactttaacattaactctttattcatcaatatcagcatgttagaatatacgtaatgcaatatataagaatggagtcaatgaaatgaaaaatattatatttgatataggtaatgttttacttgattttcaacctgaaaaatatttaagacaatattttaatgaatctgtcatgggagatttaatgactattattttttctagtgatgaatggattgatcttgacttaggtcatattatgattcaagatgcgattcaatcattaacattaaaacatcctcattatcatgatgaaatcacatttgttttgaataattggacacatatgatggttcctctacaaaagaatgttgatcttgtttataaattaaaagataaaggttattcactttaccttctatctaattttcatagcgaagcaattttaacaatgtatcaaagatatgatttctttaaactctttgatggtgcagttatttcagcagatgaacatcttgttaaacctgatgagcgtatttatcaaaaacttctggaaagatatacacttttaccagaagaatcgatttttattgatgatatgttagcaaatataaatgcagctaaaacattaggaattaatggtattcatttaccttatggcaatgatttaaaaagtgaacttgaaaaattgaaaattatttaaaaggagcaaatctaatctgctccttttattaaatatttttctattgcttctttgacaccatcatgatcacaatctgccacaatttcatctgcaattgccttaatttcttcaatcgcattattcattgcaactgcaaggccagcaatttccataatatctttatcattatgggagtcccccacagctattgtttgattaataggaatttgaagtttttcacataaatggacaagccctacacctttatgaacacccttaggtgataattctaacgaagatacttctacacatgctttggtcacatctaaatcatttaaaaatgtgatactttcttctcttaattgaggcgattgatgataaagatttactttttcaatttcatataaatgtgtttgtaaaaattcatcaacattttcaatcccactattattatgaacaaatgtttcttgatattttcccatttggtatttatccatctgatacatatgttctttcgtcgcatacgaataaccattcataaatatatgaatcatcatatcttgttttaagtaagcctgatgtattttataaatatctgatggttgaaatgttttttgataaagtattttagcttcttttaaatcataaacaactgctccactttctaaaatcaagtaacgaacatcttttaaatcatccaaataaggtctcatttcagttaaagaacgtcctgttgaaattgcaacaattttatgaagatccgatgcttccttaatagcttcttgacatccctttgtaattttaaactgtgaattaagtaaggtcccatccatatctaaagcaattaattgatataccattattgttcctcctcatcaactattattttaatatgaatgatagacttttccaatatttttcctagttagaaaacataaatcatattcatatatacaagaccttaccctatcattctcttaatttcttctaaagttccattattcaaatagacttctaaaatatcatctatcttttgttcagtacattctgctagttctttatctaaactcactttaaatttattcaataataatctttgtaagatactctttttcccattatatctaccttctctttttgctcgacttaatttttgtctatcataaacttcatcaactaattctttgtaatagccaaatctttctgcctcactagcaagacacattgcgtgagcttccttgatttgttgtaatttctttgattctacacaatctctatacgcttcttttatcataccttattccaccataaataatctcattttatcatttctttgatttcttctaaagttccattattcagatagacttctaaaatatcatctatcctttgttcagtacattctgctagttctttatctaaattcactttatatttattcaataataatctttgtaaaacattcttttttccattatatctaccttctctttttgcacgacttaatttttgtctatcataaacttcatcaactaattctttgtaatagccaaatctttctgcctcactagcaagatacattgcgtgagcttccttgatttgttgtaatttctttgatggttttgaataactatgtaattcattgttatgcataagatacataaattgatctaattcacttaattctttcgccatatctctttcctcctgtaaatattttgtattgtaaataattgttgttaacttgtcctctttaatcacttgcctgtatttcatatccatgacttctaaatgttgcttataatgatttaatgtttctaaaccacctgatgtattaataataatttgaatgacttttcctacgctttgatattcatctcccgctgtatactgttcagtcaataaaaacattccataagcacggaaccgatcatattcttcttcatagaccccattattttgtacttcaatattaataatacaatcttcacttattcggccaacaaaatcattaatcgggaatttccctttatatttttttgttgctctttcaacattttgaatatcaacatattcaagagttggatcatcaagtaacaattgacataaataaagtcttaaatcaggatagaatttaaataaatacttcataaaacgatcatcagaaaatcgcataattttagcaagctctttttggataaagttgtccgatataataacctccatatatttacctccttactatttatatacgcattatttttcgttttttcttttttttggacaacttttttcaaaattattatataactaattcattttatatgcaataagcaaataaagcatatcttaacgatatgctttatgtttatatcttgttttctcactagaaacatttttaagggaggatgtttgtacgagtataacagatattaaaatcatcaatccacctatcagtagattcatatgaattgtttcttttaacaaaatcacagagaaaataactgcaaataaactttcagttgataagatcactgaacaactgctagcactcgcaacctgttgtgctttggtttgtaaaaagaaacataaaaacgtagcaaaaacaacaatataaatacatgataaaatagaattaagtgatattgacgaaggaacttttgaaaataataaagtacaaggaatggacaaacaagcacaagttcctagttgtaatgcattaatcacttgactatcctctaatacacaagtatattgtaaagaaactaaatgcgcagcaaaaaagatagcacaactaaaagctagaaaatcacctaattcaaaagacatctttgaagttgttaaaactccaataccaatcaaacataaacaagaactcaatatttgcctttttgaaggtttcttcttaaacaccaagtaacataaataaggaaccataacaactcctgaagcagataaaaatgcattattagaaacagacgttaaggtttgagcataagtttgcaatgcataagcaataaacaacaagacgccattcatcattccttttttcactgttcgcatatgaatctttttcacttttttaataatcaataaccaagctaaagctgccgaccctacaaaacgaatgaacaaaatatcaaagcaggaaaatgaaaccaaggcttcatccacagcaataaagccaagcccccaaatcacagcaacaatcaaacaatagaaataagcttttctttcattcattatagtcatttttcacaattcttttttaattcaatggcttcttttccactgatatgttcaatatcaacaataataatattcgtttgttcaaataatttattcatttcattcattcttcctttttcatcacgaggagaatatttagcagctaaaacttcaaatgcttctttcttttcttttacattacttgctatatgagctttaccaaaaacaatcacacttctaaaataagttgtatatttttcttcaactacttgatcttgagcgatgacacaaaacgaaacctttggatttttttcaattgcatctattttatgaccacttgttgcacaatgaaaaatcaaacgattatgatcatatacaaaactcaaaggaacagcatagggataattatcatcacccataacagccaaagttcctgatgtagctttatttaaaatggcagcacattctaataatgataaagcttgtttataacgacgcatttccctaaacattatcttcacctctctttataaagaatgaatctgacagcttgcactgtcagattatacattttaatatttatatttccacatatattttcttttacttaatggatgatctctcatatcagctaataatttgttgaatactccaagcattgctgtatggaagtcataatcaaagtattcactaacttcacctaagtcattcataccatatttttcagcatcaatcactgtgaaatgatgattatattgacttaagaaattaattgctctttcatctaatggtttagtcttaccagttgatttcaacaataagaatgctgtatctggatcagtgatttcaaatggaccatggaagaattcaccagtgtggataacacttgagttgatccattgcatttccattaagatacaaatttgttgttgttgagctgcagaccatgctgtaccactacccattgtataaatgatattatcatctttatagttaattgagaatttaatagcttctggaataattgctttttcagcagcaggaattaatgtattcattttttcaatagcttcattcattaattcatattttccagtaccttcaacttgatgtaatgtttcaatagcaatttttaaaatatatccagttttactttcttcatatggagcttcagataaatctttgaataaaacaacataatcagaaacttcagtaattccattttccccttcttcgtgagtcataccaataacagttgctcctaattttttggcaacacgtccagcttcaacagtttcagcagtatttcctccacgagatgaaatgacaacaattgaattttcccctacgcatgatggtgtatcatgaacgaattcatttgatgaagtataacttgttgttacatttttcccttctctcataacatagtaataaggtgcatagaaacaagctaaagatccaccaactcctgtaaaactaatgtttttaatttctttttttgaagtaatttcttcaatcatttttttaacatcgaacatttctctctcctcctttttaaccctttcatgttcaataatctataaataaacttaattccctaagtttattcctttttatgctgctgctaagataccaaagtaatttaagataataccaacaacaaagcaagcaataacaataacaattggatgaacaccttttttaactaaataatacattaatccagttaaagctaaaggtaacattttaggcataataccatctaaaatttcttgtacaactaatgtttttccatatgttaaaggtgtagttacattaaccaaagtggcagccataccaccaacaaccattaacccagcaacactacatccatacattaacttatccattaagttactttcagaaatttgacgaattaattcttgtccttttgtatatcctaacttagctccaaaccaagtaattgggaagctgactgcaaatgagattaacatagctaagattggtcctaagatagatccttgttgtgctaatgaaataccaatactcattgcgataattctaacagttccttggaataatgaatctcctaccccagataaaggacccattaatgcagtttttactgatgtaatcatttttggatcaaatgtatctggcttttcagcatattcttcttccattgcggcagttaaacctaatacgaatgcaccaaattgtggtgtaatattgaagaactctaatgaagctctatatctttcttttttcttttcatcttcttctggttctggataaagacgatctaatgtattagaaatcccccacataaatgcagtgttcatttgtctttcatagttccagttagtttgcatacaccaaccaccccagaaaaattctcttacttttttatgtaatggataatttctttgtgcttctaaccctttttgtgacatttttcattcctccttaatcatctaagtcatcttcaagttcatcatagtcatctgcttgaccatttgatgataattgaagtgaaccatcaccatatttaatttgatagaataacacagccatgatgattgaaataatagcaattgcagttaaacttaatcctgaataagctgcaatagcaaatccaaagaagaagaaaattgcatttttcttattaatcataacagataataacattgcaaatccgaagaatgctactaagttagcacctaaagtaataccgtctaatacaaattgaggtactgcattaacaattgcattgataacatctgctcctaaataaacagccataaatactggtacaaatgtacatacagcatataacattggtccccagaaaatatctacaagtttagctttcttgtattcactcttatcaacataattatcaatcatatgagtcatactgatacgaacaacacttgctgctgtttcaataagtgtgattaataatgtcattggagttgcaatagctaaagctgtttcaattttagcacctgttaaaataaccaatgcacaccctgcaatagaacccatgttcatatcaaaaccagaagctccgatactcataaatcctaaactaaccatttccatttgagctccgactaaaagcccaacttttacatctcctaagaaaagacctacaagcgtacatgtaatgagcggtctttcaaagttcaaacgtcctaacatacgtgaatcaattcttgcaaagactgcaatcagaccgacaataatcgccttaaataacataatttttcctccttaatctaatctgcgaatcttaattcctctctctttgttgttggtaattgttgcataaagatctttgttcctaaactcataatttttttcgaatcagcaacttcttcatcatttaaataaacaacttccccatatgatttagatccttcttttttagcaataccaccataattaatttctttaaattttggatatccttcaataaatcttgcagcatccctcgtacatccaaaaacaataaagatattttcatttaaagtttcaacttttgccatttttgataaagccttttccactgtaaaaatattcaatttacatccagcaggtttagacatatttaatgccatcttttgaaattcatcagtcgctgctttatcatcaataacaataattcttgtcgctgccaagaaatgtgtccaagtaaatgcaacctgtccatgaaccaatctgtggtcaactcttactgctttaatcatatttcttcacctccgtccttcttacaaatcatctaaatcatccatgctattaacaacaccattgacatatttgacactaactaaatcatcacttacctttgatgttaagacttgagcattaatacatccaggtgttaatagtaaatcaactaaaaatgctaaatttgtatttgttacaagatgaaatggatattgtcctaaatatttaacaaaaccattattaacacttccacccatcatatctgtgcaaacaaccaattcatattgattaaaatcatgttgattcataatagattgaatcgtttgatctaaatcaaaatctggtgttgtatatccacaaactgtttgaatatcagcgacatctcctacaataatctttaatgcactcactagccctttggctagttctccatgagttgcaatgacaacctttttttctttttccatatctattcccctactctattttaattttgaaaccagttcgccatcttcaaagcgttgttcatccgcagcaataaattcatgtaaataagcaatttcactagttggtattgtaatattatagcgaattgataagtttttaaatgcttcatgaacacatgcgataaaggctttattatctctttcaaatccttctaaatcgacatattcagtaatggctgttttcgtgactaatctttcgattaaacaacatacatgaatataaataccaattaatgtcttaccaccaaaacgtttatttaagcgatcttgcaaatcatctatcgcaagggtaacgctatctaataaaacttttggattaaggattgtgagatatccaacaacattttgtaaagtaaaatctttacgtaaatcatctaataattgatttaattgctttggtgctaaatgtttagataaatgagaagtcattaaatcaatattattacctgatataatatcttctaaggcaataaagacttgtccttcgatatgtggatttgctgttccagtaataaagaggacattattactttcaaataattcatgatgtggaccacttgctactaattgattataatcacaaacttctaaatcaattggtatttgtccaggtaaactgctttcaaataattctctcattctttgagccatatgaatgccactttcacttgtaaataagattgtgtcattcttttgacgatcaataattgtataagctgcttttgatgactcactgactttttccaaggttgtttgtatatctttatcatttaagatacagtttccaacatttaaagctaaccttgttgaaacattgttgatgacaccaacactacaattaattgctgtacttaagctattccccagctgttctaaagatcccatatcaaccatcacaatgacatcagcattatgattcatacggtttaatctctcgacaagtacttctttgatttcatcaactgtgacatctaatggcatatccacagcctcaaacacataattttctaataagctattgactgcatcagcaatcgaagttgcggttgaataaccatgacagacaatcattccaaaaatattacgtcttgcgacttgagcattataatgatgtaaataaacaaccataataatgaataagatatctgtcatttgcatttctaaattagcatttactaatcttgtaatatcttctacaatcattgattcatacatgagctcacttttaatattcaagataatttcatcaatcattgaacgatgttctagatgataattttgaattgatgaactataaagttcacttatataaatcaattttgctagtgtacaacaaaatccacttggtaaattaatataacgtttctttaaaactacatctaagatattagataaagaaatttctgttcctttgattctttctggtggtattctttgtttataagaaagataatcactcaataaatcaaagttatgtttactctcatttaatgcagtttctaatccttcatatttatgcagtggtttaataatacgatcaaaataatcaaatataaaatcaatttcctcactctttttgtaagttgttgtatcgatgtatataacattttcatctgtgacaattggcattgtttgaagaagatgttctggtaaatcataagtatgaataatcacttcttttttgccagcactttctcttaatgcacttgcacacatcaattggattgttgattgtaaacctaataaattgttttcataatcaccattgactaaggctcttaaaacagcacttgatattttaatggttttcttcatctttaatccttcattttgaatgaagtgaataatgagttcttctttttcttctttgctcttatcttgaagtttaggaacatctaaaatcagagggatgtttttaagaagtctttcactcatacaaagatgaggatgaatatcagataaaagcatatatcgaatatttttgtttttatatttgcttttacttgatgatttgtttttgtccatttctaacaagagacataattgttcttgaaattcatgggacatatactgagcattgcaaatcatgaaaactaaatgatttgtactatcaatcaatcctggttgattgtttttgccaaagacctttgtaagtaatgtttggctgttggttggtgagaattctaatttgatgagttttgtatcggcatgaattgttccaattcgcgctgcattctcatagattgttgtacataatgttctttttccagtacccttctctccattaagaataactggtaatccacaaggtggatattcaaagctttctcttaattgtttaattacaatggctaatgatttatctgagccgattatttttgaataattcccctctccaaaagaatgattcataacatattgtttgacttcttctaaatcataaaaatcgtcatcttggaaagttgttttgtaaagttcttccattttcttacgatgtaagaaataaactggtctagaattaattttcatgacaactttctctttaacaagctcattaagatactgacttgcaaggcttctacttatatgcatttcatcactcattgctgaagcggtaaatgcattgacttgggtaaagtcgaaagtttctgtcagatcactcaaatagttcagtattaaatcttttgtgctatttgccatatttctacttcctttcttgagatatctgattcatccctgcctcacagctacaatatatcgtattatgacatcttataacaacagtgttgaattttttgacacttaaacatataattgacatattttttataatcttcaacacttttcaacacacgtcaacacaaaatgatgtcatttgtaaaagacagtcgaatctacctttattctacaatagattcgactatttttaaattatttttcttaattagaaatagaggtcgttaaattaactgcccatactcctgtacgataacgtctcattccaaagataacacgtacgacttgttctaattgacaaatcaagaaaacaagtgcaatactttgaatttgaaaaagatgaacacatataaaggcaagtggaatccctacaccccacattaagccactatctaaaagcgttaatatctttgaatcgcctccagctcttaaagaagaaaagacaatgacaataaagaaacgtaaagctattcttagtgagaaaactttaacaattaaaacagcttcttcaatcacttgagaatttgttaaatgaaagattgaaacaaggaaatgtgagccagcaaaaatcaatgccattgctactgttgataaacaaacagccatcccaataaaataatttccttcttctttcgctttattttcattccctgcacctaatgacattcctacaatcgcagcaactgcattagaaaaaccattagccaaagcatagaaaatatcagatatcttagctcctacataataagcatccatagaacttgttcccaaaacaccaaacgctttgataaataatgttgatccaaaaccaaagaataattcattaataatgatagcttgggttttacgcataatatttttaacaaaacgtatatcaaaagaaaacatttcagataaacttcctaaaaagatttgatgcgtgcgataggcatatataaagtgaatacttacagcactcatgtgagctaaacatgttcccaatgctgctccttgaatccccatctttggcattccaaacaaaccaaagataaaaatatagttgctgatgacattgataatcattgccataatcccgataattagaggaatacgtggttgattgatatttcgataaacaatattaaaagcaaactcaattgctaaaaagacataagaaaacattgcaattcttaaatataataaaccattttcaataaccatagcatcttgtatataaaaaccaagaatccattttccaaatattgccgctaataaaaaccaaaacatccccgaaataaccgctaagaccaaacttaatccaaatgagcgttttaaattcaacatatcttttgccccaaaaaactgaacggaataaattcccactccagcggcacaagcccatgaaaccgatgtacataaagtttctatctgaacggcagttccaactgctgtcacttgaccaatccaagaaaccattaatgaatcaataattcccatacaacttgtgactaattgttgtaaccctaatggtatagcaatataacatgcacgcttataaaaagactttggtcccatataatgtctaataatatccataaaatccccctctctctagtccatattataatttctttaaacaaaaataaaaaaagtgtttaaagactcaacacataatgaagaattcaaacactttatttctttatctgacaaatgaatacttttctccaacaatatactgtaaactataatgtactggatttccttcactatcacccataattccatccataacaaataatggtgcaccaattggaacttgtaacaatcttaccatatcaccacttgcagttgttactgtaataactgtttttaaagaacgatcacaaatgattccttttttctctgctaataattcatacaatgatccagttaatggttcagtcattaaaaaaccatattttgcataagaataataattattttctatcatcaatggttctccatcagcaagtcttaatctttggatatagagaacttgatcatgatcacttaatttcaagatatctttcatacgttcatccaatggtagaacttctctttttaagacaactgaagaactttccattcctgcatttctacatgattcactaaatccaacactatcttctagtggtctaaagagttttggttttgttgcaaaagttccttttccttgttttttaattaaataaccttcatcttctaattcagccaaggcatttcttactgttatacggctgacatcgtattttttacataattcatgttctgaaggtattttttcacctttttggatttctccactttcaattagtccctttattgtattttttaattgtaaatataaggggattgaattgttatcatctaatttcatttttatacctcacctatatttctcttatttttattatatcctttttaaaatgaaaaagcgataaaatatctatcgcttactcaaataattgaatgacatcatgtaatgatgaaacaactgctaaggcttgatttttttgtgtatcactagcaggaattaaatcaggaaccatgatacaaggaatattagcacgatatgctgcttctacaccaacgattgaatcttctaaaactaaagcttttaagggagtaacatcaaaatgttggacgactttttgataaatttcaggatgtggtttacgtttagtcacttcatcaccacataaaagataatcaaagtagtgtagtaaatctaatctttcaagtctttctattgttaagtttctatcagttgcagtcgcaactgcacgagggatatctaattgtactaagagttctaataattcataaattcctggttttggatcaatatgttcatttagtaattgtctgccatagacacgtgcttcatctaaaatcatctctggactggccaagtcttttaaatcatttctcacaatatcttcaacttccttaccgtttctgcctacacattttaagaaagttgtttccccaagatcattgattccatgttttaaaccaacttcttgccaagctttttgccatcttgcttcggtatctagcattaagccatctacatcaaaaataacgagttctggacgcattcatttttccccttttattagtattctaatttccacatatatctacgttttgtaagtgggtgatttctcacgattgctaattgttctgcataaattcttaagacagctgagataaccattggactgaagtattctgcaacaccaggtaataatgaaccaagtccaaagtctttagcatcaatgactgttgtttttgcatcaaatctttcaaggaaagttaaagctctcgaatccatagcacgagtacgtccatcattcattaacaagataaatggaacgtttttatcagtaatttcaaatggtccatggaagaattcaccatcatggaatgatcctgagttcatccattgcatttccattaataaacaaattgagaatgaataagcaactttatgagtagctcctgatgacattacataaatcacttcatcatctttatagctatcagcaaaagcttttgcttctggtaatacactcttaacagcttcatcaataattccatagatactattgcatccattaaccattgcatcatatgtttcaaatccttcatattgatttaaaatttctacagcaattaataaagctttattcatcttatccatttttgctgagtaactaccttcccagttatgaacaactaaataatgacaagctttcgctaatggtgattctccattgtttgtaatcgcaatgacagcagcccctttttccattgcaagtttagatgctgcaactgtttcaggagttgttcctccaagtgaacaagtcacaacaatagcatcttcatttaatccttttggtgttgcatagttaaattcattagcagtatataaagcaatacgtaaagctttagcatttgcttctaaaaaatatttagctggatataattcagcttgtgatgctccacatcctacataataaacagattttacatttggtttttcttttttaattgttgcaataatgtctttaatttccatctttttctctcctctacttgttttattacatcttataacaactttacacacataatataacatcttattacaagtcagtcaacattaaaatgcaaaaaatgtcaaaataaaaaacaagcttataaaaacttgtttttactataatgttgattcattccaattcacataacaatctaatacttgttgaccaggaacttcatttttcccttctatttgatcaataacaattttagctgcttctaagccttcctcaaaagctggttgaacaattgtcgtaatacttggtgatgaaaagttaacccattccatattatcaaaccccatcaatccaagttgtggcattttcttacgatgatgttttaacgctaagaaaacagttggcaatgcccaacaatttggaacaaaaaccaaagtttttttatcaaaatgaatacgtgtatctaaaaaatcagcaataacttcaggctttacttcatcattttctactataaacatttcatgcgtcaaattattatcagctaaagcatcaacaaatccacttgttctttcaagtcttgtactaatcaattgaggatcagcagttacaagaaaatactcctcataccctttttcaatacatttgactgttgcatcataagttgcttcataattatttgttttcacccatttggttttcatatcatataatttactatcaaagaaaaccattggtttacctaaagcttctattctttttgatatttttctaaattgagctgttggctgaataataaatccatctactcccattgacaacattctttcaacatacttttcttctctttgatgattatagtcactatttcctacaataatctgataacctgctttacttgcagccgattcaattcctttcacaatttgattggaaaatgaatttgtaatatcaccaataagaacacctatcaattggctattctttgaatttaaactccttgcaacaatactcggacgataatttgtttctttaatcacttgttcaattttttgttttgtttcttctgacattttttctgttttaccattcaagtaaaaagaaacagttgtttttgatgttccagccatttcagcaatatctttaattgttactttactttttctcattttgatatcccctttaaaacattacattttcattttaacacaagattcctatttagtaaatctgtttactaaaggggtttcattattggttatatccataaacctctatttgagaaatagctgcaaaatttgattcatcttcatttttaataaaaccgtaaaaacgtatcctttcaacatctttttgttttattttaaaaacttgtgcctgatttgttgaaatcaaatcaagttgctttcttacgccattggaaaattctaaagaaattttattaaaataactatcatgaggaaaatctgctcgcaaataaatatgtatttcttcaacattaacttttcgaccaaaatcaatggttaatgaagcacttggatcttgcatataactccatgatgtatatggccacctaccatgttcattgttaaaagttaatccatcaatgatatttttagcctgaaatactggttgtaacttatcatctaaagatgagctaacatgaggaaaaacatgattttgattttcttgatcaactgtatttaaagctaaattttgatatgattgaatttgatttaaacttggttttgtaactttaataagatgttttttattatagaacgctttataactatatgattttctttgttgctcaaaaggaatatagtattcaaaaattccctcttttaaataaatcattgtttcttcaattgcatcatcaatcttaatatgaaggtaagttgggacttcatctggataaatacatattttatctccttgttgatattcttcattataaaaaagttgaattttatttgttccatcttgagaagctttgacttctttatcattttttatttcaattctcatttttgtctcctttacgaaaaagaaagacattagtctttcttataaataggatgatcaatcaaatctaattcgttgatacaaattccttctgtttcaaaaactacaattttatttttccctttttgaagtaatggaccaggtaaatataaatattcaataggtcctttagaccaatatcttcctaaattaaatccattaataaagataacacctttacccaattgatgacaatcaataaaagtatctatacattcatcaacttctaattcaaattcataaaaagctggtgtattttcttgccaaggttgatcaaaatcaatatcatcaatattatttaatggtaatgcatattgtttccaatttgtttcaaagtgcatatctaccatgacaccagaacgaatccccttcttttgcgttggagccaataatttataaccataattgacacgccccatattctctaccaaaatagaaagttcattctttgtttcaaagtgaatttggaattcttctccaatttcttcttgatattgtgtgatgatatgttgttgatctttatagactttgatacgatcacttgcctccataactttgactttttcttcttgatggaatcctttgacttctgttttatatagaacatatccatatccttcacctaactgttccattgtcttaggaaaaacactttcttgacaatttgataaactatcaagcgtatgaaacaatgaaacacatcttgtttgtggaatttttccataagcatgtttttgacgaataagtggttcttgttgtttgatatgtgggaataattctttaattactttttgaacttgatagtatttttcagtaggatctcctgcttctgttaataaagcatcataatcataagatgtcacttgtggtaaatctctttgttgacgagcagaacatccattcataaatccaaagtttgtgccaccatgaaacatatacaaattaatacttgcacgcattaataattctttaacacaatctgctaaatccttcgcatctcttgtgatgatgtcttcaccccagcgattaaaccaaccatcccaaaattccattgacataagtggccaattctttttatgttcatacataaaatcttctaaaacatctaaattttcatttgaacgtgatccaaaatttgctgtgacaagaacatcatcatctatcagactaccagactgtaacgcttgtttccaagatccatcagatgtaaataaaggaacttccacacctaaatttatcatcatatcttttaattttcttagataagtcttatcatttgaaaaagaaccatactcattttcaacctgcatcataataattggtccaccttgagtatattgcaaaggtgttaataatggtaataaaacttcataatagtgtctgactttttctaaatatttagaatcattacatctcaatttaagattatcttcatttaataaccatgctggtaatccaccaaattcccattcagcacaaatataaggagaaggtctaacaataaccataagtcccatttcttgagcttgttttataaatgcaacaacatctttaaacccatcaaatccaaattgtccttcttttggttcatgaagattccaaggaatatatgtttctacggtattaaaacctaatgcttttagattatataaactatgataccaatgttctggaaccattctaaaataatgaatagccccagacaaaatttgaataggcttcccatcaactaaaaaatcatcttttatctcaaatgttttcattttcttctcctaccaacatgttttccattcaggattcaataaacgataaagagcttccatgtaaaaataatctccccatagattttcttcatcaacgcctttattttcactatatgcataaactccatgcattaataatccttctacatctttatactttgaagatgtatatgtttgagaaagtgctccaatcattccctttgcaatcatttgtgcatcctgacgatatccaactttttgagcttccatcaatccacaagctacaattgcaagagctgaactgtctttaggttcatgactcgtatcatcaaaacataaatcccaataaggaattaaatcttgaggtattttatcaataaaatattcaaaaacatgtgtccatttattctcatcatttttttgttgagtgattctttcatggagtggaatccccaaaattgcccaagcctgtcctcttgcccaacaagattgatcactaaaaccttgatgtgttgctccatgatcaggttttccagtttcaacgtcaaaatagaaagtatgatatgttgaataatctgatcgaataatatgattgatgacttgttgataatgagcatcagctttatgcgcataaagaggattattcgtaattttgcttgcttcatataataatggcaagttaaggagtgaatcaataattaaacgatattcttgaggatttccaagttgtccccacgcttgaataaattgtcctttttcttggaatctatttaataatttgtctgctgcctcaacaatgatcttttcaagacttttctcttgtgtatcacgatataccattacaatggatggactatacaaaaatccaatatcatgatgatctaaaacaaaatggtcagctaatctttgttgaaaacttttaatatttttcataacaatatcataaaaagcttcattttttgtatattgatatgccatccataacattcctgtccaaaaaccatttgtccaatcatcattagctttaatacgataaatgtgattggttgtacaagctgatggaaagttttcttgaaatctatcaatattctttaacagtttttcacatatccaatccatttcttgttttaagaatacttgatctacattttgaccaagttttgtatattcttgtattattttctcattcattttcttatctccttttgaaaaaggcaatcattttcatgaatgcctttcattgtttaaaagaaattttcaatgctgacatctggttcatcaggaaccatttgagcagtgactttaattcctgcttgaagtaatttttcaacagctgctttttcttcatctgtcatactcactgactttttatattgagttgtccctggacggtttgacatatttccaacgttcactggtaataattgaatccctgcttccatcattttgactaaaatgactggtgatttcacaaccaacatgactctttgaccagcatagtttccatttttaatatttgcgacagctttatcaaattgtaaaattgatgtattgactccagctggtgcagccattcttaaaactgatttttccgtttcattgactgcgacttgatcatcaataatcataatacggttgacttttaaaccagttgcccaacgtgttgcaacttgaccatgaatcaaacgatcatcaattctaatgtgtacaaatccttccatttgttatcctccttctatccaaagatttttaagttgaaagttaaaattcccaaaacaactaataataaagtcactcttgttgaattcattttctttctacctaataaccagtatgttaataataccaccaaacatggtgcaagtgaaggcataatcttatcagctaattcttgaactgcaatagaaacttcaccttgagtaaatgtatatgcaaattttgcattaacaactgaaggaatcaaagctccaataactgtaatccctaaaacattagctgcttttgtaattttctttaatttatttcctaattctccaacaactttagccccttcacgatatcccattttaaagaatgatttcatgaaacctaaacgtaagaatccaaacgcaatccataaaattaatgccattggatttccttctaaagccatatatgaagctaaagatccaataattgttgatggaatcacatggaataaagtatcaccaattccagctaaaggacccatcatccctgtttttaaagaagctaaagtttcaacagattcaattcctttttcttcttgtaatgcacaatccaatcctaaaacaattggtgccattgtattatttgtattaaagaattgcatttcaacttgagctgctttctttaaatcatcttcatttttatataattttttaattaatggtaaagttgagaaatagtatccaagaccttgcattttttcatagttccatccggcaccacctaagaaataccatctccaaaagactttatttgtttctttactcaattgtaatttactcatcacccatacctccaacatttgtattattgatagatgcttgttcattatcttctgattggaaaacataaatagccatagctaaacctactaatgcaacaccaaatactggtacatttaaataagcagctaatacaaatccaacaattaagaatgtaatatttttagcaactggtaaatatcttaataaaattgcaatacctaaagctggtaaaataccacctgctgtttttaatccactcatcaaccatactggcatatgatcaacaacaccttgaacaaacactgaaccaaataccaacgctaagaaaactggtaacattcttgataaagattgaggaattaatcctaataagttcattaaacctgctttatcaaaatcacctttttcaacataagcttctgctttatgttggaagaaagtatttgagaatcttgctaaaacatctaattgaatcattaataatccaattggaatagccaatgttactccaaattctgccccttttccactttcaattgcaaaagcagttcctaataatgctcctgtcatataatctggaatagatgctccaccaaagtttccaacacctaataccaataagtttaatgttccaccaacaattaaaccagttttcacatcacctaaaattaaacctgcaaagaaccctgccattgttggcttcactgttccaaaagttgtattatttccatcatagaatgaaaatccagcataaattgttaataaagcaatttgccaccattgaattgtcatacaataaatcctccctattcgtcttcatcttcattattttgactatataaatccatacaatcaatatttaatctattagattcaacaacttctcttaattcatcaatgttgttgatatcaatatctttaaataaaagttctaagatcaaaggtaaattaacacccgcaataacctttgccttattttttaaacctagtcttgataaaatcaattctgcttgattaaaaggtgttccaccttttaagtctgctaaaacaatacctgtgttttctgataaccattcttttaaatatgtttctaacttattagcaaagacatccacgccttcttcagttaattcaataacatggattttactaacatcaccaacaatcatttgtgctgcttgttgcataccacttgcaacaccgtgatgagatacgataagtatattcatggttccctcctgtttttcttgtttaccggtttacttacaattccattttacttcgtatagaaagcgttgtcaatcattttttgcataaaatttatttggattttttcggtcttttagacatatataaggatgatatttgtcatatttttgttaaaaaggcctattttttatttttatcaagaaagtttttcacgttttttcttgacaaaaccggtttactaatttatgatttgtgtgtactggttgttacttactggtttacctaaatggatatttgttcttatccggtttacttctatccatttaggtattgcttcaaaaaaaggagatgaaaaaatgtctgaaaaatttaatatgaaccaattttccttaactggaaaagttgctttagtcacaggtgctagttatggaattggttttgcaattgcttctgcttatgcaagtgctggagcaactattgtatttaatgatattaatcaagaattagttgataaaggtattcaaagttataaagaattaggtattgaagctcacggttatgtttgtgatgttacaaatgaagaagctgtgaatgcaatggtgaaaaaaattgaaaatgacgttggtgtcattgatattcttgtgaataacgcaggaattattaagcgaatcccaatgtgtgatatgagtgcagatgattttagaaaagtgattgatgttgatcttaacgctcctttcatcgtttctaaagctgtcatcccatctatgatttctaaagggcatggaaagattattaatatctgttctatgatgagtgaacttggtcgtgagactgtaagtgcttatgcagctgcaaaaggtggattaaagatgttaactcgcaatatcgcatctgaatatggtgaatacaatattcaatgtaatggtattggtccaggttatattgcaactcctcaaactgctcctttaagagaattacaagaagatggatcacgtcatccatttgatcaattcatcatttctaaaacacctgctgcacgttggggtaatcctgaagatttaatgggaccagcaatattcttagcaagtgatgcaagtgactttgtcaatggtcatgttttatatgtagatggtggtatcttagcctacattggtaaacaaccacaataaaagaaaggaagataatcatatgaaaattgctttaattaatgaaaatagtcaagctgcgaaaaactcagttatttacgatagtttaaagagtgtagcagatgcaaaaggatatgaagtttataattatggaatgtatgaaaaagatggtgaaagccaattaacttatgttcaaaatggtttattagccgcaattttattaaacagtaaagctgctgactttgttgtgactggatgtggaactggagttggtgctatgcttgctttaaacagtttccctaatgttgtatgtggttttgcggttgaacctactgatgcttatttattttcacaaatcaatggtggaaatgccttatctattccttatgcaaaaggatttggttggggtgctgaattaaacttaaaattaatgtttgaaagattatttgcagaagaaatgggtggtggatatccaaaagaaagagctatcccagaacaaagaaatgctcgtatcttaaatgatgttaaaaaaattactcatcaagatatgttaacaatcttaaaaacaattgatcaagatttcttaaaagaaacagttgctggagaaaaattccaagaatatttctttgcaaattgtcaagatcaagacattgctgattatattaaatcagtattataaaaaagatattacgtgatagcgtctgtcattttgatttcctctcacttaaaaataacaactatcgcgataatatactagctgtcatcacatgatgacagttttttgaaaggatgattatatgaaaatattattttttggagaacctttaatcagattaacccctactcatcaccaaaaaatgaatgattgtagagatttaacaatgtattatggtggtagtgaaatcaacatagcaaaaacattagctggtttcaacatacctagtaaaatcttgactggtttaccacaagacccaattggagatagttttcttcactttttaaatcaatatcatattaatacatcaagtatttatcgtaatcaccaaagacttggtttatattatttagaagatggttttggtattcgttctagccaagtgtattatgatagacaatatacaagcatccaagatattgatatttcacaaattcattttgatgaactattgaaagatattactcattttcattttagtggtattactgttgcagtttctaaaagtgttcaagatgctttaaaagtcattttagaagaagctaagaaacgccaaatcattatttcaatggatcttaatttacgtacaaaaatgatctctgttgaggatgctaaatatcagtttagcagatttgcaaaatatgctgactattgctttggaattgatccaattatgtcacatgaaaacaatttagaaatgtttgatcgaaatcatgcatcaatagaaaccattgaaaaaagaatgaaagaattgcaaagtgtttatgctttcaaagccatttttcatacaatgagaactgttgataaaaataacatcaatcgttattatgcatatgcttatcaagatcaactttatcaatccgttattttagaaactgatttattagaacgtgttggtagtggtgatgcttttgtagcaggtgctctttaccagatcatgaatcaggcttctatgcaagatgttattgattttgctgtagcttcagggactttaaaatgtacaatccctggtgacagtatgtttgagagtgtcgaaaatgttcaatcattactaaaaaataatcatgaaatatcacgttaggaggaaattatgaaaaaatcagaagttattatgaaattaaaacaacaaggtgttgttgctgttattagaggtgatagttttgaagaaggatatcaagcaagttgtgcttgtatcaaaggagatttgaaagctattgaagttgcttttactaacaataaagctagtgaaatcatttctcaattacaacaaaactataaagatgacaacaatgtcttaattggggcaggaacagttttagatgctcctacagcaagaaacgctattatagctggtgcgaaatacattgtttcaccatctttcaataaagaaacagcaattatgtgtaatcgctatggtgttccttacattccaggatgtatgactattagagaaattgttgaggccatggaagctggtagtgaaattattaaactatttccaggtagtgcattttctcctagctatatcagtgcaatcaaagcaccattaccacaagtttcattaatggttacaggtggggttaatttagaaaatgctcatcaatggtttaaagccggtgtagatgcaattggaattggtggagaattaaataaattagccactcaaggtgaatttgataaaattactgaaattgcacatcaatatgtcgccacaaaacaaaattaaaaaagagttaagaaacattataaccacagaagaatcattttaatattctataaacatacaagaacttaattcttattcataataaaaggtataaatttaagaacttcatcttaaattatacctttttataattgaaccaatatttagatttaatttgttaaaataattttttctatgcttaaccattaagtgagataatctttttttcatctattcacttatttcttcaagaatcagatctcgtttttttctatatatgagatacataatcagactaatcacaactacaattacaataatcatcataaaacaatgcataaagaaactttctggtaaaatagtaatcactggatctgttgtataatcaaatatccaataatcattacggaaaaagattttatgaaatatcacaaaagcctgatcaaaatcaagtgctgctaaaaaacctataactgttggtatccctatagaaaacatcggagttaatcgtaagaaacgatattctttttgtttgatattttgataaatcataaccaaagatattcctccacttacaacaaacaagatttgaatcatatcaaaaattcttttaacttcttcaaaatgaatacgtcctgttgttgacattacaaaatcaggtaattgtaatgttccttgaaaaaagatactttgatattgaatcaaaacatcataattttctttaattaactgtttaggtaaacctgtatttttagcaatatttaaataatcaatatcaaaataatacaattgtttaaaaaagactgtcactatcacagcaaaacaaataatacataaagttaataataaagctagaacaatatctctagctctattcttggtaaataaagtcttcacctttttgaacctctactttagataattttggataatcttgttgacgtaatgcttcataaatgccaattgctacacagttagaaagattaagacttcttgcatttccatccattggaatacgcacacattcatctaaatgatcttttaaaatatcatgagggattccatcatgttcatgtccaaataataaatattgatcattgtttgaaacatagctttgatctgtataacaaagtttagaataacgtgtaaagaagtgaaaatctccttggtttttagaaataaaatcttcccagttttcatagatttccatttgtaaatctttaatataatctaatcctgctcttttcatatgtttatcatctaatgaaaatcccattggtttaataatatgtaatttagaatgagtagcaacacatgtacgcatgatatttcctgtattttgaggaattgctggatgtactaaaacaatatgattcatacttatttctcctttaatatttgatatagttttttaagtgccttagcacgatgtgagtattgatttttttcttctaatgataactgtgctgatgttttttttaattctggtacataaaaaattggatcataaccaaaaccattttctccttcaatatgatcatagatttccccatcaaagtattcttcaatcaagataggttcttcatcaggaatacaaagagccatcgcacaaacaaatcgtgctcctctttcttttccttttactgcatctataatatattgatttttaatatcataactagtatcgtgacccataaaacgtgcagaataaatacctggtgctccatccattgcatcaacttctaacccagaatcatcggctaatgttggtttatcaatcatttcacaaattgtttgggctttaattaaggcattttcttgaaatgtttgaccattttcttcaatctcaatttcttcttcaaaaacatctttaattgatttgacatcaattcctatttcacttaacattgcacgaatttctttaatttttccttcatttgtcgaagcaacaataatttctttcatactattcctccatttctaaagctttcttaacttctaatataggcattgcctgtccagtccaaaactcaaaagatacagctccttgatataaaatcattccttcaccattcatataatccaatcccttatcttttgccatttctaatagttttgttttcttgggattataaataatatcggctatctttaatccctgatgtaaataagaatcatcttcaatcaaacatccatcgatatttggactcattccaacattcgttgtctgaatcaataaataagcatcctttaaatcattctttaaagcctcttgatcacttaaagacttcaaaacaatcggacaagataacttctcattcaattcccttataaacggtttatcacttcgattatagacaacaatttctctagcctgttccttagcaagtgaaacaataatcgcacaagcagctcctcctgctcctaaaacaacaatcttttcatctttaatatgccaattcttctcaaaacatgcttttataaaaccttgtccatcactaatatgtccaatcaaacgtccattctcatttttaactgtattcactgcctgacaaagctttgcttcttcagttaattcatctaaataatccataatctttaatttataaggcatagaaacattaaacccttttatattcaatgttttaacacttgttataaaatcacctaaatgctcatcagtaacttcaaacgccaaataaacatcattaattccaagtgtttgaaatgctgtgttatgcatcattggagaaaaagaatgtttaatcggatgagcaacaataccatataatccagtataaccagtaattgtattcttcattaaaagaccaccttctttctattcttctctattatatagcaatatgttgcatagacaaagtaaaaatattccactcagttaatttatttttagaatctgaaaataatttcctttttatctaataagtttgtataatagatgtgtaatacgggaggacaatacaatgataaaaaaattaattatgaatgctgatgattttggcatgacacaaggaaattcaattggaattttaatggctcatgcacaaggaattttaacatctacaacttgtatgatgaatatgccttatgctgaatttgctctgaaggaagctgaaaaatttcctcatctaggagtagggattcattttgtattaactgttggtagacctttagttgaaggagcaaaatcttatacagataaagatggaaacttcattagacctaaagattatcctgatggacaacctcatgctgataaagatgaactctatacagaatggaaagcacaaatggaaaaatttattgcgattactggtcataaaccaacgcatatagattcacatcatcatgttcatttactaccttggcatcaagaagtagcaatcagattagctaaagaatatgatttaccaatgcgtcaaagagatcaaatcttagatacatatgaatatattcgttgtgatgatcgtatgtatggcgatgatgctaattatgactttgtaactcaagcttttagtgttgatgaagaagctttagaatttatgtgtcatccagcatatatcgatcaaagattatatgatatgacaagttattgtttaccaagaatgaaagaattagaattaattttatctcctgaaatcagaaaattcattgaagataacaacattgaattaattaatttctcaaatgtaaaaaaaatcaaataaaaaaagcatctcgcacaatgagatgcttttttctaccaatttttatgaacatcctctttagtaatagaacgaacaacttcacaaggattccccacagcaatcacatatggtggaatatcatgagtcacaacactccctgctccaataattgctccttgattaatttttactccaggtaaaattgttacatttccaccaatccagacattatcataaatcttcacaggcttagcatattctaagccttttattctttgaacttcattataaggatgactcgctgtataaatattgacattagggccaaggatcacattatccccgatactaactccaccctgatctaaaatcgttaaattaacatcactatagaaattaagaccaattgtaatattatagccataactacaataaaaaggttgttcaatacataattcacctttacaatttaacaatttctttaaaatcaaatctcgactatccttatccattggagatactcgattatactcataaagcattcccttacaaaattctctatcttgataaagctctcggctatatgcttgatacaaatgtccatttaacatcttttccttttcactcatgacttgacctcacttttacaatacttttctatttgttctaataaaccctgacaatgataagttgcaaagacacttggttcaatgctttgaactttgattggttttagtttttgtgataattgagcttctttatatcttaattgaggagcaattaagattaaatcatatttttgataaatactttctaaattatagacagctgttgcttgaatatcataaggaagtttgtttaattcacaatattgattcatcttttcagcaaaatatcctgttgtcattcctccactacaacataaaagaatatgttttttactaactgtttcttcagttaatttatcaatcatacgataaaataaatctgttgcataatgaaaattataaaactggtaatgcaaataaaataataattcttctccttcactaatcgcttcttcaataattccaattggccaaacaacaaatctagcaactttattatgataaaaaatcttaaatgttcgtttatcatatttttcaattatgagacgtggatcattttggacttgaaaataaacccattttctaaagacttcaatattttcaatacgatagaacttatccatatatcctcatcccctcttttgttattatactaaattttataacaaaaataaatcaaagtctttgattctctattttttaaccctttattatcatttaaatccctcaaactaaaaggattaatacctgcacaatacaggaattaatccttattcactgtttaacaaagaaaccactaaaattgctttgataaatataactttcttaatctaatacttctccattactttcaataacttttttgtaccaatcaaatgatttcttttttcttctttctaaagtcccatttccttggtcatctttatccacataaataaatccataacgtttactcatttcaccagttgatgcagcaactaaatctatacaaccccaagttgtataacccattaaatcaacaccatcttcaatagcatctttcatagctttgatatgttctcttaaataatcaatacgataatcatcctgaatcgtaccatcttcttcaattttatctttagcacctaatccattttcaacaatgaataatggcttttgataacgatcatataaagcatttaaagtaattcttaaacctaatggatcaatttgccaaccccagtcacttgtctttaaatatggattcttaactgatttcacaacatttccatcagtcattcccatttttggatttgcgctagcacaacgtgattgataataactaaaagaaataaaatcaactggatattgtcttaaaatttcctcatcaccttggcaaatatttaaatgaatatctttttctttaaatacccgtttagcataacttggataataccctcttgcttgaacatcaataaacattaagttttcacgatctttattcatagccatccaaacatctttaggatcacaactataaggataaaattgtcctccagctaacatacaaccaactttattttccggattgatttgatgagctaactttgttgctaatgcacttgcgactaattcatgatgagccgcttgatatttgacttgttctctattttctcctgctttaaaactaataccagccccagaaaaaggagaatgtaataaaatattaatttcattaaatgttaaccaatatttaaccaaaccatcaaatctttcaaaacatacttttgcatatttgacaaaacaatcaatcatttcacgacttttccatgaatcatattttctaacaagacccattggtacatcaaaatgacataaagtgactaatggttcaataccatatttttgacattctttaaacatatctgtataaaaagcaattcctgcttcattaggttctaattcatcgccattaggaaaaattcttgcccaagaaatagaagtacggaatgttttaaatcccatctgagcaaataattggatatcttctttataatgatgataaaaatcaatagcctcatgacttggataattttctccttcaatcaattcaacaggatacatatcaccaagtttcacatacattcttttttctccatgaggaatcatatcgacggttgttaaacctttaccatcctcaagatatgccccttcagcttgattcgcagcaatagctccaccccataaaaaatctttaggaaatcccataatcttctcctttatctattaattcttgaagtccctgactccataaagttctcaatttcttctacactaaatgtattcgcatcaccatgaatcgtatgctttaagactgatgcacaacaaccaaattccaaactatactttaaatccttaccattcaataaaccatataacaatccagataagtaggcatctcctccaccaacacgatcaacaatatcatcaatatgataagtctttgatacatacagcttatcactatacagataccctgttaaatcattaacactggtagaaagaatatcccgtctggttgaagttatatattttaaatgcggataaacttctttcatcctcatatatacttcattcaatcgttcttcaaagctctctttatcacttgtgatacctaaaaagttttgagcatccagatatccggctgaaagaatatccacataaggcagaatttctttcaaagctgccccagcttcttctattgaccacatctttgcccgatagttactgtcatatacgacagtaatcttatttcctcggcaatatctgagcatttctatgattgcttctcttacactctgattgagagctgctgtgattcctgagacaacaaagacatccacatccaagaacaattcttcaagtttaatatcgttcaaggaaaatgaagtcattgcactgtactgacgatcatagatgacctgactgcttctattgccacttccattttctagaaagtaacttcctatacgcatatcatttctgataatctttgttgtatcaacaccaaatcttttcaagcaagaaatgactgcatcacccaaggcatgatgtggcagctttgtcaacaaagttgtttcaaaaccaaactgtgccaggcttacggcaatattggtctcacttccaccaacatgaacctgaaaatcaagttcacttatgcgatgtcctttctgcgttgaatagcgcagtaaggtctcacccatacacaggactttcattattctctcgcctcgcttgctttcttgacatattcagatgctattcttgtgatttcttcaaattgtcctgcttctcctagcttattcaattcaccaccaacaccaatcgcatctacacctgccttgaaccactgatcaagattatccaatttcactcctccagtaaccatcaatgagacttgtggaagtggtgccttgatagctccaacatatccaggtccaaatgcactgccagggaacagcttgatgatttcactacctgcttccattgctgtgacgatttccttaatagtcatgcatcctggaatataaggaatcccataacgattacatagaacagctgtatcataatcaaatgatggtgagacgatatattttgctccagcaagaattgccattctagcagttggggcatccaaaacagttcctgctccaatgcagacttctttatgatccttatacatttcagatagctgtttgataatctcagaagcattggcatttgtataggccatctcaattgctgttagtcctccagcaatgcatgctttcgagataccgattccttcttctaagctgttacctctaataacagcaacaactccctgtttctttaattccatgataatttctgattttttcatattcatcctcctactccatatatccacctttcattggtgaaacggcatgtttggtatacattgccatgactccttttgaatatttagccttcttaggttgccatttttcttttctttcctgtagaaccttatccacgagattcaatggtgttcgttttccagcaattccaacaatattcaaggcacgatttttgacacttatttcaatcaagtcgccatcttccacaagagcaatcggtcctccacttgctgcctctggagaaatatgtccaatcgctggtcccttgctagctccagaaaaacgtccatcagtcagtaaggcaatcgatgccgacaactctggatcactggaaatggcttcagtcgtatagaacatctcaggcattccacttcccttaggcccttcatagcgaataaagaccgcttctccaggattgattctatgtttaaggattgcatcaatagcatcttcctcacagtcaaagacacgcgctgatagtacgacttccttcatggcctctggaactgctgaatgtttgaccactgccccttctggtgctaagtttccttttaagatagctatagctccttcttcattgagtggctttgaagcaggtaggatgatatcctctcgtttgacatgtacatcttttagatgagcaaagcatctttcatagtaaccattcttcttcagttcctctaaattctcacctagagtttttcctgttacagtcaggacatctaggtgcagatgatccttgatagcctccataattgcaggtgttcctcctgcatagtagtaatactgagcaggatagaaaccacttggtcgtagattaagaatataaggaatcgtacgatggatacgattgaagtcctcaccagtcaattctatcccagcttcatgagcaatggctggtaaatgcaataaggcattcgttgacccagcaatagctgcatgtaccataattgcattctcaaaagcttcttttgttaaaatatcagaaggcttgatgtttctttcaaccaagaatcggatatgccctccaatatttttggcaacatccttgagttcctgacttgtcgcaggcaacaatgaagtgccaggcaatgccaagcccaatgcttcagacataatctgcatcgttgttgccgttccaataaagctgcaagctccacagcttggacaggcattatgcttataatagttgaactcatccaatgtaatctctccacgttgatattgagcagagtattttccaatctgttcaagcgtcaacaaatcaggtccagcattcataaccccaccaggaatgataatagatggtgcattcaatctggcaatagcctttaaatgcgcaggtactgctttatcacaacttgacaggaaaacacagccatcaaatggtgttgcttcatattgaatctcaatcatattggtcatcatctcacgtgaacacaaagaataattaattccatcatgtccctgtgcttctccatcacacatatctgtcgcatagtatttagcacccttagcattaactttctgcagactttcttcaacataaccaaccaattcatttaaatgagcacttcctggatgagaatcaccataggtactttcaataaagatctgcatcttatccagatcctctaccttccatcctgttccaattctaagtggatctaattctggggctaactctctcaattcttggcttttcataacaatcatcctttctatttttctaatgctgctaaaacatgttttaaaactttttctccattcatcattccataatcacgcatatcaatcacttcaacaaccttatcaggatataatgattgaatattcttaaattgaaaacgcacttgcggtcctaaaagaattgcatcagcatcttctccataagcttctacttcagctactggatgggcttcaattttcaattcaagtccttgtttcttggctgcttctaacatacgtgtaactaacaaacttgttgacattcctgccgaacatactaataaaatattcatattattgtctcctatttatattcattttcttcatcttcaatttcaaactctcttgtttgaataatatctttatagaaataagctgatttctttaaatgtctgttacgattatcttctaaatcaatctcaaccaatccataacgatttttaaaagcattcattggtgaaacattatcagtaaatgcccataacatataacctttacaatttgaaccttcttcaattccacgaatcaaccaatctaaatgcatttttataaattcaatacgataatcatcttgaatcattccagtttcatctttatattgtttttcgttttcaacacccataccactttcagcaataaaccattcaaaattatcatattgatttttcatacgcatagccatatcatacatgatacgtggataaatttcccaaccacgatgaggattcattttcttaccaggcatattgaaatcttcataataaaaatctggatggaatggcgcatcagggtgaacaagtgttgtacgtcctttgacacgatttggatgatataagttaattcctacccaatctaaagtattattttggataatgtctaattcttctttcgtataatccattaaaatattatgtttctttaataactcaaagaatccttcttcataatgtcctttaatagccggatctaagaaaacacgattatagaataaatcatacttatcagctgcttctaaatctcttggattatttcctcttggataagctgtttctacattaataatcgttccaaacttaccaccttctatgcgatagccaccttctttataaactttcatgaccatatttgttgctaatgctttattataattccattgcatccaagcttgactatcttgataaaatggataacgcaaagcatctaaatggattcttgtttgaacgaccactggttcattaaaagcaaaccaatatttaactttatgaccaaatctttcaaaagcttttctagcatatttaacaaataattctacaacatgtttacttgcaaaaccatcatacttttcaaataattctcttggtatttcataatgttctaaacaaaccattggttcaataccttgagcaatcatctcatctaacattttatcataataagctgcataatcttcatcaacaactacattttcataatctgttaaaaatcttgaccaattcaatgatgttcgataacagttcattccaatatctttcatatagccaatatcttcttgataacgatgataataatctgttgcgatagctggaccataaccattatgccaaacatttttattctctttataccataaatcaatatacgaatcctgatgttcttttttaccaaaccaaccttcagtttgccaggcacttgcagcagcccctaagaaaaaatcatcaggcaatttcacagtttttttcatttttctattttcctttcaaagcatcaataatcccaccaagatacattgcccctaaggcacgatcatacaatccatatcctggttttcctgtttcaccccaaatcattcgtccatgatcaggtcttatataaccatcaaagcctgtttcaatataggctttcatcatttctaccatatctaatgaaccgcaagaagaatagtgagcactttcttcaaatgaaccatcttctaagattttaatattacggacatgagcaaaatggattcttttttgttttccatattttctaatcaaatgcggcatatcattaaatgttgcacacccaagtgaaccactacataatgtcaatccatgatgagtatcatcatataaactcaaaaaacgatctaagttttcttcatttgtcacaattctaggaatcccaaaaatagaccaaggtggatcatctggatgaattgccatattgacatcacaagaagatgcaaccggaatgatttcttcaataaaatattgaagattcttccataaaccttcttctcctaattgttgataggcttcaatcagttcagtaatttcttctggagaataagacgcatcccatcctggtaatgttaattttgttggatctaacttatcaacttcattcttataataaacaagagcttgagaaccatcttctaaaagatgatcaatagaagatcttgtccaatcaaagacaggcataaaattataacaaatacatttaatcccacactttgataagttcttaattgtttgtttataattatcaatatatctttgataatcaccacgtttcaacttaatatcttcatgaacaggaacactttcaatgacttcaagttccaatcccgcttgatttacaacttcctttaattcttgaatcctttccagtggccagacttctcccactggaatatcatagatagcactgacaactcctgtcacatttggaatttgtttaatatatgtcaaagtcacaggatcatcttgtccataccatcgaaatgtcatcttcattttatacctcctcacctaacaatgaccaagttttgctgatatacgatcagctactgctttaaccaatacacctaaatcatctaaattaacttgactttcataaaaaccaacacaactaatagaagcaacaacttttccggtatgattgaaaattggtgctgccgcagcaatttgttgcaacgtattctcacgatcatccttagcataacctttttgcttaacttcttctaattcttttaaatattcatcaggtgatgtaattgtatgttgagtatatgaaataaaatctgttttcgcgatagcttcttcaatttcttctttagaagcaaaagcaatcattgcttttcctaaagccgcacagtgaatagaacgtcgtgttccaatattagcagtcgtaataatacttcgctctgattcatatttataaatatacgtcaccatattatcatcaagaatagccataaatgttgtggcttgcatcttatttgcaaaatctattaaatcatttcttgctatattaactaaatcaatatcattaatataactactaccaataagaaatgattgtaatcctattttatatcttgtaacaccactttgattatcttctaaaaccatgtttttaaaaactaaagttttcattatatcgaatatacttgatttgggagaatctaaaacagtcgacaattgtgttaaagtataaccttctttacttttagataataattctaatatatctatagccctcataagggtacggttcaatttcataaattatcacgcttccttcctttttgtctgtatttacgaatagcattcgtaataatactttatctataatatacttacttttcttttcatttacaatctatttccatgatttgtaaatgaattttagggaagcctatctcttttatcatgattttaaaaaatatttaatctttctaattgtaataagataaaaataataagtattgcacttgctacaaaggattgagctaatttttcaatatgtgtaaattcagactttgtacaccaaatccgatacaaggcatatggtggaaaaagaacattaaagatataagtgattattttatacttggtaaaagttttcacttgatgaggatctggtttattgatttgttcacgaagttcaataatatgtttttgtcgatcacttaaaccatccattcgttttcttttatcttctcttttttcaactttagtcgccataatgattttcctttcatatcttttcttctacataacctaattccttagaaatttgtaaagcactgtttttcacaaattttgataattcttcaatatctaattgttttgaataactattcactaaactaatagctgcaataatttttttgttatggttaaatattggagctgcaacacagatttgagaaagcgtatcttcacgattatcaacagcataaccttgttgtttaactttttctaattcttgtaaatattttggaatagatgtaattgtgtattgagtatgagcaataaattgtgttgtttgtaaagcttgattaacgatttgttcatttttttgaaaagccattaggacttttcctaaagctgtacaatgtattgacttccttgaacctaagttggcagttgtgatttggcttttgggcgattcacatttatataaataagtcaccattccttcatcaagaacagcaagaaaagtcgttgcgtggaattcttttgataaagggattaaatactttttagcaatattcacaagatcaaatcgttctaaactatgacttcccacaataaaagaatgaatccccatactatacttaatctttccaccgacttgattttcaacaatcatattcttatataataaggtttttaaaatatcaaaaacacttgattttggaatatctaaagcttgagctatttctaaaagcgaaactccatcttgacttttagcaatatattctaatatttcaattgttcgtaaagccgttctgttaactttcaaaaaattcactcctttttaaatgcccaaaagccgcaataagcggcttcgacattaggcttctgtactgtcaattttttgcttattagcaatcattacaaatggtgcatatacaacaattgtaatgacaatacataataattgagttattactgtaccaatacttcctcctgaagcaatccaagcatttaataatggtggagttgtccaagggaatgcatagattaaaatatctgcaaaaccaataactgtcatcatataaccaaatgccatagttattaatggagtaataataaatggaatcattaataatgggtttaacataattggtaaaccaaagtgtaatgtttctgagatattgaatacatttggagcaattgataacttagcaacttgtttataatcttcacgtttagagaataataaacaagcgattaataaaccaatgacacatcctgatccaccaatatttccatatgtatcccaaaatgacatagacacaatatttaaatcagctggattgtaatttggttgtgaaacaatttctgtatttgctaaaatagcagcattcaataatggatcacgaataggtttaataatttgattcccatgaatccctacacaccagaaaatttgagcaacaaacatcaataacataactcctggtaaaccttgaacaacagcttgtaatggttcttgaacaaatgcataaataatatcatataaacttaaaccaataacttgaacagctgtaaagttaatagctgcacaaataatcactgttaacataaatggaaataagttattaaaactatttgtaacatttggtggaactgaatcaggcatatgaatttttaacaattcactttttctaagaaccgtaaacaattccactgaaactaaagcaacaatcattcctaagaataatcctcttgcagctgtgtaatcttttgcaagaccagcaacagtcactgtttcttccccaactgttgcaacaatatttgtacttaaacaagctacaaagcagcataaagaaacaactcctggcataaatcctttaatgccatttttcaatcctaattccaaaccgattaaaacaactgcagcaaccgtaaagaaattaagtgttgcatagttagcagcagtaaataaatctgtaaacatttctagccaagcaaaacctccgacttttgctaagctgattccatcagttgttgttgaacaaacaacattaacaaccaatgtacagaatgcaccagtaataatgactggcattaatgtagtaaatgctgttttaatagcatacatgtgtttttgattactaatcttattagcaaccattaacattttttcagtaagagcatctgaaatattcatcgcaatttttccctccttcgtatttgcgaaccttgttcctatatctgtattctagcatgtcattaataagagtcaacgagttatttgcatttgcgtctcatttccgtatatacagataaataaggacgattttatagaaatatgtaatatttagtcacctaaatcctctccatgactcttgataaccttttgataccaataaaaactatcttttttaatacggcgataattatcattcttatcaacataaacaaagccataacgtttctcaaaaccatctcttgttgaatataaatcaattgcagaccaagttaaaaaaccaatgacttcaacaccttcatcaatagattttttcatccattgaatatgttttcttaaaaaatcaatacgatattgatcatgaaccttcccattttctaaaatatcttgataacctaaaccattttctaaaattaaaataggtaactgataacgatgataataatcatctaataaatgttttaatccataaggttcaatattccatttccactttgtttgtttaacatatggattaggatctttaatacaatttcttaaattgccttgataaacccgatgatcaactggaatcgaaaaataatacgttaaagattgaaaatctggttcactatgtttaataatttccatatctccatcttgaatcacttcatcaaaatgagcacctaaaaaaccatcaagatatcgctttgtataaattcctcgataataaacatcactatttccataaccgattttataagccaaatcatcagctaattgaacatctactggattgcatgttttaggataaaaacaagcattaccaatatttgcacctacttgtgcctttggatctatccgatgaatcaaacgtgttgctagggcataagccagattaaaatgatgaacaatttgaaatgtttcagttatgtttttatcggcataaccagtcatgtactgagaatcaaaacttgcatgattttgttcattaaaaggtacccaatattgaacacgccctttaaacgctgaaacaaccgtttcaacataatgcaaataatcatcaatacattgtcgattaatccatccttgatatttttcaattaaatgatatggtaaatcataagcataaagagtaacgacagggataatatgatatcgttctaattcatctaagatagcacgataaaaatctaaaccctcctgatttatttcaccatcaccatgaggaaaaatacgactccaagcaattgtaaaacgataaatctgaaaacccatttcaccataataagctatatcctctttataacgatgaaaatgatcactagcttttttaaaaccttcaaaatcaccatttgttaaacttggtatatatcttttatcagcaatacttaaaccctttccaccctcgttataaccaccttcaaactgttgtgcattcgttgatgatccccataagaaaccatctggaaatctttcattcacaattttatcctccataattttctatgaccattgacgtctctagtcacttaaaattattataagttttataaaaatagtcaattttttaggtacaatctgccttattttgcaaaattatgttatactatttgcgcaaattattttctcaaaggagacaatattatgaaaatcccattaaaacaaattgcaaaagattgtgatgtatctgtgactacagtttctcgtgtcttgaatcatactggcagaatatcaacaaaaacaaggcaaaaaatattagcttatgttgaaaaacaggaaacaattttatatactcaaaatttttctaagaaaacaattggtctgattactcctaatattcgtaatgaatattattcagctatgattagtgctattgaagattatttttttaaaagaaattattctgtgattctccatattacatccaaaagcaaacaaaaaacaatagaggcttttgatgatttggtttatcggcatgtggctggaattatttatattggtggtccacaaaaatattattatgctgatgatttggatcagatacctttagtatgtattgaacataatcctttaattgatcaagcttgtgatagtttaattactattgatcatgatgctgggggttatttagcaacgcaggagctcattaaaagaggttgtcaaagaatattatttttggctaatgaaggcatgttgttggaaaaacaaggacgtttttctggttacataagagctttagaagatgctcacctagaatatcaaaaagagcttgtttttgtttcaccaagcttcaaatttgggattatggaagctaaaaatgcaattcattacctatcaacaaaatcaattgaatttgatggtgtctttgctacgacggattggcgtggttacggtgtaattgctgccttgaatgaattacacgttgacattcctcatcaagttcaagtcattggttatgataatatctcaatttctaaatattctctcccttctctttcaactattcaagttgattatgaaatgattgcttcattagctagtcaacatcttgatgctttaatgaatcatcaagccatagattctcctatgacagttgtccctttacactttattaaacgaaatagtacaaaataaaaacagctagattcacatgattctaactgtttttatttaatcgatgtatttttctttccaaagcaacaaagaaatgctcatcttcactttgatcaaaacgaatcagatagagacttaaaaccaaaccaccaatcaccgccactaacatatccgtaattgtatcatgaacgcctgttacatttctaatagcatcatattgaaagaaaactaacaaagcatattcataaaattcccaaaacaatgcaatcattgcattaacagcattaacaaacaacaacataaggccttttcttttgtcatttctaaaataatgtttatagaaaatataaaccaattcactaatcacaacaccacttgcacaatgggtaaacttatcataataaggtgttgaataaccacctaagcaacttccccataagctggcaaaataaacaaagataatattaataatataaaactcgattggtactttcactttcattattttcataacaataggcacaataaaaggtgttaaacaagccacaaatgtcatttgaaaatacttgccatgataattcacaataaaggcatagataagcgtcattacataaatcacgatgcataaatagaaaaaccaatttagttttttatttttcacaatttcaccttcctgaataccttcttgaatgattaagtcgttcttctatctttaaaacactccatcttgttaatggtaaaacaataacaacatagaaaatacatagtaaaaataaacttaaaacttcatactttgatctaaagaaataatctccaattggctgcataacaaacttaaaataaacaaagcttaaaataagccatataacaacatacttcacatattttttcatagtcttaccccacttcatttaataattgttcaaataaatcaatatcttcctgaatcatatcaatagaattttgccaaaaatctgcagatgttaaatcaattccaacactttgtccaacttcttcaattgacatcttaccagttaaagataagaaattttcataagttttactaaaggctgctccttctttttgataaagaccatacaatcccttagctaacaataacccaaatgcatatgggaaattataaaatgcataatctgcttcataataatgtggtttccatgtccacatataaggatgaagatattgaggatctaatccttttccatatgcctctttttgtgcctctaacattaattgttttatttcttcaacacttaaaggtccttcttcacgttttttaaagaaacgactttcaaacaagaaacgtgaataaatatcaacaatcacttgtgcacaatcacaaagttcattttctaaaatcataagtttttctgttggtgaagcgttttttaaagctgcttttttaacaattgtttcacaaaatgtagaagctgtttcagcaattggcattggataatctgcatttaatgccgtctgactatttaaacactcaccatgaaatccatgacctaattcatgtgccattgttattacatcaccaaattcatttccataatttaataagaaacgactttcttttaaacaatgaagattatgacagaaggctcctcctactttaccagctctaggatcaacatcaatccaactattttccatagccttttttgcatagtctcctaaatgttgagaaaaagttgaaaattgtttcacaacaaattcacacccaacttcataaggataagatgtttgactttcaaccacaggagcatataattcataccaaggtaatccattatcatatcctaaacgtttggcctttaattgaaaatacttttcaaacatccccaatgccttttgcattgttaaaagtaaaacatccaaagtcttttgagacattcttgaatcaattaatgttctttgtaaaactgaagaataacctcttaactgagtaaccgttaaagcttctcccttaatagcatttaaagcacttgcaataccttgttcaacatcataataagcattaacctcagcaagatatgctttttttctcgtttcttgatctttagaataagccatatttaaaacttctgttaatggataagctgttccatcaatcgttacttttaaagaagatattaattgatctttatattttaaccaggcagaagatccatttgttttcatttgagctaaaactgattcactttgttcatctaataaatattgattattctgttgaatttcttttaagataaacaaatgttcctgaatataagcatcctttacatttgtaaggtcgaaagcccctaaccatttttgaattttagcttgagtatcagcaaatgttgctagtaaggtttcaagtgatgctgaatactttaatgcttcttgacaagttgtattagcactgatcgttaattctatataagctgataacttttctacaagatcattcaattcattttcttttattaaataatcttttaagttttcttctgttttatccataagaggatattttttcatatcctctagtattgtctttactgcttttatatcatctaaaaaagactgatcattaaatgattgatataattcctttaaactccattttctatccatgataaccacctctaaaaactattatactatataatgaatatattttacacctaatagataagaaagacaaactttaagacgggttttatttgcgaacaatcttcaacaatgttatgatagctctaaggagaaatgatttatgaatacagatgattttataaaacaatcaatacaattagcaaagaatttttgtcatttatatatgtatatgaaaactcccgaagatgttgaaaagattagtcttttattaggtgagcaactatctgtaatcgggacaggtaaacatgaaatatatcatcataaaaaggattttgttgatgggttatatttaagtttattagaagttcaagatattgaatttgaactgcttaatgaggaatattatggaacacccttaactgattctctttgtgttatttatgggaaagtttggataaaagaagttaatgataaaaataaagctttgattgttgatatggatacccgtttttcaattgtctgtcaatatcaagatttagatattcaaattattcatctccatcattccatgccttatcttgaacaaagtgaagatgagcattacccaaaaacacttttacaaaaagctaatcaagctgtagaatactcacaatatcttgaaaaaataattgaattagattctttaaccggactttataatcgtattgcgattgaaaataagattgatacttttttaatgaatcatgataaaggttatgcttttatggttattgatgttgataattttaaaaagttgaatgatacttatggtcatctgtatggagatatgattttaattgaaattgctaatctactgaaagacttatttcaagaaaaagcttatattggcagagctggtggtgatgaatttattatcttcttccatcaatatctttctttccaagatactgctcatgaagcttatcgtattataaagggctgtgaagatttatcatctaaacacaataacaatatcagttgttcaataggtattagtttttcatcaatagaaagcacattttctaaattatatgctgcggctgattctgctttgtatcaaagcaaaaatgctggtaaagctcaatttacatttaaaaagggagtatgaattttcatatctccctttgtttatattgtgtaatatcatgacaacaaagcataactgccttttgaccattccagctcacatatgtagtattaacatcaagccacatattcaaaacatcattatatatgtcttgttgaatactcttgacttcttcatttagttttttaagtggacaattttcacaaattccatcctttttcataaacacttcataacaatgccttcctatcataaactttggagaaatttgattggccttatgatttacaaaacaaatcttataatcaaatggattaatcacataaatcaaagcattctgattatccaataattctcttaatcctacagattcttgttgatatgataattcagctcgactctttaataagaatacactcaatatttctgaaataaaaaccaaagcatcaatttgattttgtgtccaataacgattcttacgacattcatcaaatccaacatatcctttaaaatatccattatccataattgcacattgcaacaaagacttaattccttgtttttctagaatcatacgtatttttttaggtaaaaaagatatatcagaacaatagaaaataccttcttcattaaattgatctaaatagtgatttcctaaatctctttcataagaaacatttgttaatttatctatttgtggttctatatttttattacaccattcatatgtattactacaataacgtccatcttcactattttcaaagatataaacacgactaacatcaaattgtaagccaacaatctctaaaatagaagcaattgctaattgaatattttccgattgataaagcattctaaaaacatattcagccaattgtcccgtcaacaaatgactattcttatcagaatcaattgtttcattaataactgaacgaacaggtacactattcattaaataagcacttatattcttttcatcataaatcacacattgattcttgccatcacttttagcttggtataaagcttgatcagccttttggaaaagacatgtaaagtcacgtccatcaattggtgcaatcgatatcccaatactacaagaaatttgtacttcatgttcatggctcacttgtaaatgatgtgtttcatcaatcattctttttgcaatatttttaatactctcaatatctctaacattaatcaaaaagacaataaattcatcgccaccaattcttccaataatatctctatgatggaaaatctttttcattcttcttgcaatatcactcaaaactgcatcaccaaataaatgacccaaaccatcattgacttccttaaaattatcaatatcaataatcatcattgcacataattcattttgccattgatgagccaaataatctttaatcgtattttgtgaagtgattttattaaaaatacctgttaatgcatcttgttgagcttgactaattaaatattgagaacgtcttttttcttgatctatatcgataaaaattccaatggctttcattggtttcttatctggacttaactgaatggttaagcgcaaacgccaccattgataatgttgatgagaattacttaatcgaaattcttcttccatataagtataaccagatttaatttttaatagaatttctttccattttataatatcttcaggatgaaatatatcatttgtttgatgagttaaaaattctttaatatgtcctttaggtattcttttccccataagtttttctaaattctgtgaataatgtaactgattattgacaatatcccattcaaaaacaatatcatttgtttgatcaataataattttaaaacgttctaaagcaagttttaattcttctcttgcacttttttcattagttatatcaatcataatacaatagaaagatggtccttcttcttcatgaccttcaatcaattgtcccttatccaacacccatacagaatgaccatctttatgcacaatacggtattctatttgtttggtttttcctagtttcatttgacgattaacttcatctcttgtagcaatacgatcttgaggatcaatcatttcccaaaagctattatggaacttgtcgtttatttcttccttggtataacctaccattgataaaaatccatcactcatatataaaattgtaagttcttcattaaataaacacttaaaaatacctccaggtacattatttgttaatagttctaatcgtgtattcgcattttttaaattcttttcatcttcaatttgttgaacaatccgatgaataaattccttttcactacgatacaaagaaacataaacttcacttaataaatattcttcatcttcttgtactaataataaacttccatataaagaaagtggatgttgaatattttgatatgagagtaaaacatctactttataaaacaaaagaatatgcttatcatcttttcttattgcatcaaaatatgattgtttgatttcaaaatgataatcaatatcctcaaccaatccacccaacatattttgaacttcttgttttcctcttaatattttttgacattgaatactactgactcttacatctggatgtaataaagaaagtactgtttttatatctctatcttgataatatgattttataaattgttgtgcaaaagctaatattttcttatcaatcatgacgttatcctctctttcctactgcataaaataacgttcttcaaattcttttgcacatattggcttaccaaataagaatccctgaatataatcaggtaacgctttttttacaatctcaaattcttccagtgtttcaacgccttcaacacaaacctttaaatcaataatatgagcaagcttaacaatatactctaaaaatgtatattcataacttccttcctttattcccctaataaaactacgatcaatcttaataacatttgctggtaattcttttaaatgacttaaagatgaatatcctgttccaaaatcatcaatcgcaataccatatcccatttcttgaatgcctttaaattcctgatttaaaaactgtagattaggcacccaacaattctctgttaattctagaataaagttttttaaagttaactcatgatgattattcctcaaatattctaataaagcattttcttttaattgtatataagatacattaatactcatcataaaatctggattatattcctgccattttttacattgcgttaccgcttgttcaaagacccattttcctacctgaataatcaaatgactttcttctaataatggaataaattcaataggtgaaacctcaccatgttgagaagaatgccatcttaaaagtgcctcagccccaaccactgcttttgtcttggtatcaatttgtggttgataatataattcaaactcatcacatcctcgacttacacaagcatgtaagctttcttgtagttcaataagttttattttttcatgatacatttctttagaaaagaaaaccaattgattctttccattaagctttgcaacttcaacagcactttctgcatgtcttaataacttttgataattgttgctgtcttttggaaaaaaacacgctccagctgacatagaaacataaatctgctgtccctccataacaaactggttaccaatatacatttgaatattctcataaatcattgtcacaatttcttttgttcctttaggaatcaacaaagcaaaaacatcaccatccaaacgatacatttgacaacccactggtaaaagtgtcgttaactccctcgcaataaaattcaaagttctatcaccaaaagcataactatatttttcattaatatttttaaaattatcaacatctaaaacaacaacaattccttccattgttgtttgctttaacagatgctttaaatctttttcaaattgttgtcgattcatcaatcctgtcacattatcaaacttattttgtttaccaatattagaaatacgtcctaccatcaactgtggtaaaccattctcatcctttttaaccttacctcgacaagaaacccaaatcacttctccctttttattataaatacgatactccatatcatgatagtctttctttccatcatgtataagctgcatatcatccaaccaggcttcttgatcttcttctatcattgcattcgaccaaactgaaatgacatttgtttcaatttgacgactaatttgaagctcatcaaaagaattatctgacatatgaaaaagtccattttggatatcccaaacataaagataatcttctgtactttctgataataagtcaaaaaaaacatcaactgataagtccaaattatgaatagcactcgccatgacactccaccccattctctataatttaattatagacctatttacaaacgaatactataaaactcgtacttacaaaaaaaactcttattttaaaaataagagtttctatcaacactttttcattatttcatacgcattttatctaacgcagttgtgataatggcagtaatcggaaaaataatccatcctggatgccataaattctttgtaaatcctaaaattaaataaatcatgactgctaaaggcatcgttacaccaaacaaactattttcttcacgctttgcttctttaatataatcttcattgtgaactaaaaactcatacatactctttttaatcccttgataaataaaaagaaatacagcaattgaaacacatatcattaattgagcagccaaaatttcctcatttaataaatgtccggaaaacaaagcaataaatgcaaccgaaaaaataattaaacagaccccaaaagcaatcgataatccaaaacttgattgaaaagtatgattcttatcagttatatcctgtagatcttgatgactcatacgaatttgctttttctctaactcatgatatgtctcactagtaatcccagtataaatcaatccaaacacacttaatgcagcaatagccaaaagaagaaaaattcccagtgtttcatatgcactatctgctaaaagaatagcgggaacaatccctaaaataattgctgaaacagatattccaattcgtaaagcaaaacgttttttaaaagtcatatattcttgtatcttttcattgttcataaaatataatgaatcattatcttcttcatgaactgactcatagtgatctttaatcaaataatcaattgatacatgaaacatctcacttaataatattaatttatccatttctggatatcccgcaccactctcccatttgcttacagcttgtctggaaacatttaactctaatgctaaagcttcttgcgataatcctcgcgcttttcgtaactcttgtaatttcattccaaaatccatatatcctcacctcgtcgttatcataccctaatcttgttattttcactaccaacattctcttgctttttgtcaacgtaaagttgcaactgcctttttttaatattgcaacttcattttaacacattttattattcaaaagcgtaaaaatgtggtaaagtattaatagttagagaatcgagggtgatataaatgataaaagaatttcaagaattattaaaagaaaaacaaattgattattatattgttccaactgatgatgatcatcaatctgaaacagttggtgaacatttccaatctcgtgcttatttaagtggatttactggtagtgctggaacattattagtaactttagatagtgcttatttatggacagatggaagatattttattcaagctgctaaacaattagaagaaggcattactttaatgaaaatggcacaaaaaggggttcctactttattagaatttttagctgaacatgtaaaaaacgatgatgtgattgggtttgatggacaaactatgacatgtcaatttgttttagacttagaagaaaaattagatgttgattataagattgctaatgtggatttaatgaaagagttttggcctgatagaccagctatgtcttgtcaaaaggcttatatttatgatgcaaaatatcatggattatctgctcatgaaaagattgaaattattcaagagtatatgaaagaaaatgattgtcaatcacatatcgtttctacacttgatgatattgcttggatttttaatattcgtggtagtgatatacctcaatcacctacagtgatggcttttgctttaattactttagatcaatcttatttatatttacaaaatggtacttatgatttagatatggtaaaagcttatcaaaaggaaaatattttaattaaaggatatcatcaaatctatgatgatgttgctcatcttaaaggacgtgttttattaaatacaaacagtatcaattatcaattatttagtcaaatagagtgtgatattgttgatggcttaaatccatcacaagcatttaaagcaattaaaaatgatgttgaaattaaaaatacaaaaaatgctcatatcaaagatggtgtagctatgactaaattcatgtattggttaaaaaccaattatggtaaagttccaatggatgaaatcagtatatctgataaagtagctagctttagacaagagcaagacttatttactgatttaagttttacgacaatttgtggatggaatgaaaatgctgcattaatgcattatcatgctactaaagaagatcatgcaatggttgaaggaaatggtttcttattaattgatagtggtggtcaatatttagatggaacgactgatattacaagaacttttgctttaggtgagttaacacctattcaaaagaaacattttacaatggtattacaaggtatgttagctttacaaaatgcacacttcttatatggagcaacaggattaagtttagatattcttgcaagaacaccaatgtggcaagaagatattgattatcaatgtggaactggacatggtgttggtcatttcttaaatgtccacgaaggacctcatagcattcgtcctcgtccacgtcttcaagaagaagaatgtaaattagaagctggtatgattgtaactgatgaaccaggtatttatttagaaggtcaatatggtattcgtattgaaaatgaattattatgtgttgatggagttgaaaatgaatatggacaatttatgcattttgatgtattaacttatgttccaattgatttagacgctattgatgaaaacttattgacttataaagaaaagaaatggttaaatgattatcatcaagctgtttatgaaaatatttcaccttatttaacagatgaagaaaaagcttggttaaaagaatatactaaagctatttaaaaagtagtcatgaaatgacctttaaagttatttcatggctacttctttttttgtttccatatttaaaaagaactgatcaatttgattctttaataaatccattgattttatatgaagttttcttattaattttgtcatcaaataaatcatcaagacaatcaagattcccgctgttaaacaaagaatacgtgtttcaatagctgtcattgtatccaaaataacaagtgatgcattaagagcactcactgcattaataacttgtttatacttataatcaggtaaaaagaatcccacatacccaagtaacatcacaacccaaatcgcatatttttgaggaatcaacacttgaaaaaatataaaaaacaagacaactccaattaaagttccaataaaacgatgtttaattctttctaaagtttcactaaattcaagctgtgttaaagacatcacaacaatacttatccataatggttttcttaattgcagcaaacttccaattaacatggctagtgcaattccaaacgacattcttaataaataactacgattcttttgacatcttaaaatctgttctttaaaaccaatatctcctccataatgatgtgaatgccaacgccataaaacacatcctccaacgaataatccacctataacacaagccatcatacgcattgggaattgttcccatttgacaactgttgattgtgcaaagacaaaacataataaaaaagaaatattaggtttactatgaagcggttcattactcaaaagaataattaaacttacaaataaaaaattgctaataaaagctaaccagggattgataagtgttacttgaccaatcaagccacttccaccataaagcaagactataattaaaaacattgtcattggttttaaatctaaattacacataggaagcattgtaaaaccaactccaattgctactccaactaaggtattttccataccaaagatcatttgaaacacaaaaacaaaaccaacattaaccaaaaagcgaaaagcattttgtaatatttgaaaacctaaactatttttatctatttccatcataaccacacctttcattcttgcattttatccaattatcatttatgataattatatagtatacttttatagatagtaaacttttatttactattatagacacattatcatgaatgtcaataggcattctaaggaggaaaaatcatgaaaaaaactttatatcaaaatatcatccatattttgcctcattggcactataaaattgaaagaagcattaaacaaaaacaaaaaaataaaaacatcagttatgaaacatatttttgtttattaattttaaaaaaaggtggtttagtcaagatgagtgaaattgctagagacttacgtttaagcaaacaacaggccacacaaatgattgataagctttatcaacatggaatgattgatcgtcaagatgatccacaagatcgtcgtagtattctcattggaattaatgataaaggaaaacaatttctcattgataaccctttagatacttcccctttacaagaacaaattcaaactcatttaacagctgatgaacaaacagaattcaatcaagccattgaaactttacttaggctctttagaaaatgggattaatctttgcataaattcgttgataaaccaactgcatttttgtaaatagatattttaattcaaactaatagaaatcgtctaattgtggattgtttgaaaaaattgactcctaaagctgttaatgttagttaattcatttttgctcaaaaatatactcttgtctctcagaatttttataggttatcggatacgctctcgttatctttatttttacttatcatatgcgtaaaatttaaaagtatcctcataaaataatcatttaatttgtactcatatggatcatacaacacaaaaaaatggactatcaatccgatagtccaacttttgtattcttttcttttaatctttgatttgtccatcttcgcattaattcatatatcactgagaacgttggtaaaccaaataccatccctggtattccaaataaaccgcctccagcacttacagcaaataaaacccataacgctgataatcccactgaacttccaacaacatgtggataaataagatttgattcaaattgttgtaataaagtactaaatattaagaaaataacagctttaattggtgatacaaagataattaataccgaagaaataactgccccaataattggtccaaaataagggataatatttgtaaaccctataactacagcagcaatcgatgcatatggaatatctaaaataatacaaccaatataacataacacaccaataatgactgattcagtcaattgtcctgctaaaaagttttcaaaagttgatgaagttaaacgtaaaacctcactcgcttgattgaacttttgatcatttaaaaaagcatgtccaactttttttacttgtcttaataatttatctttagacaataacatatatactgccatcacaaagcccataaaaatattcacaatggttgaagtaatatgggtaacgccaatcgcaatacttggaacccatgttgataatttacccaaaattgtttgtcctaaattttgttggaaattctctatttttacaagaatatcttttgataaatgaacttctttaaagaaataatttaaccattcttcaatttgactaaatattcctggtaaattatcaattaacatacgaatattctcaatgacttgtggtaaaacaaccataataatgactgttaaaacaaagaaaaccaatagaattgataatatagcagcaactaattttttaaccttttcttttttaattggtaactttttaatcaaatatttcattggaatattaaaaataaaagccaatacaaaaccaataataaaaggtttaataattccaatcaattgtccaataaaacccataatattcttaaaatatatcagacatagaattaatccagcaatataagtcactagaataatcatattttttaaagtcaaatctctcatcttatctgttgaacgcattttatcactccactctttaatcacattataatcagatattgtgtattaaatgtgaagaaaggttattgttttttatattcacaataacctttcttaccatgggcttttatacaatataaagctttatcagctttttcatataacccttcaaatgtttcatcatcattaggataaaaagcaaccccaatactacaacttccatgatagtgatgagattcatcaatttgaacttgagagactttagcaatgatttcatcacatttcttaaagacatcttctcgatttgtaatttgatccatcaaaatcatcatctcatcgccgccaattcttccaacaatatcataacttctaaaaatttctttcaacgattgagcaacagtcgttaaaaaatgatcacctacaacatgtccatattgatcattaactgctttaaaatcatctaaatcaataatgagtaaagctttcaattgataatcgatcaatctttcggcaattaatttttctgtatttttcttgttatataaatttgttaaagcatcatatgttgcttgtcgacgtaatttacgttgttctctatgaaccagattaaatatagcgcctaaataaacagtgactcctaatataacaattccaaacaatgctaactcatgtcttgaaaagaactgatatggagcatctgcaacagtcgtaggaataacatatcctaaactccaatcatcaacttcaagtggtgagaaagctaaatacttttcttgattatcatttaaaatataataatccggattcccattctttaattccttttttatctttttaaaattgctattttttaattctgccccagcaaaataatcaaagaaattcttttcattacgaaaatattcagtagaatccacagcaataaaatcaccattactattaacaacaaaaacatgtccattttctctaaacgtttgtgaagggaaaataagttcacctacatccgataacttaaacgaacctccaacaactccaataaccgctttatctttataaataggaacacttaaaacaattcgatactcatcatcattttctgtactcactgatcttgttacaactctttgaccttccatagaacgattaaagaaaggtctgtgtctcgcatcaaaaacttgatttaaactcgtatgtgccattccatctggagtaataatatagaccttactcataagtgtattatcatctaagcttgtagccatattcatggtatgattattgattaaagtctcttgagttgatgcaaaactagataatgattctaaggcatgaagttgttgatcaatgattttttcaatattatttgcttgtaaaatcaaactttgttttaaattatccgctgctgttttttgaatttgatgctctattgcaaatgaaaaaattaacaatgaaacaattatataaacaactaaaataagactatatttaataggtgttgttaactttttatataattttttaatttcttccattttaggtccctcgctgattttattatacttattttgtattaagtttaaaagcattttttatgacaataaatatttttgcataaaatcatcgtgcttttgtatttctttaaatagaaaacatcctactaacaaaacaataaactcccctacaaacacataaaacatattcataaagaatggtaaatgcaaaataaaatacaattctcctccaacaataataccattaattacagcaccagcgatcgctccaatataaagattagaaactttatacatcacaattgtagcaagtgttgttgcgagtgttccaaagataatatcagcgaatcctaatggggaaggaatattggctaaaaagcatccaataattaagcctggaatatatttcttattgtaaaaaacaagaaaaataaagatttcagaaaaccttaattgaatggccccataagaaagaccagagcataatattgtcaatacagcataaacacatgcaatcatggcatttattgcaacaactttaacatctcgttttttattcatattgtcctccttcttctcaagaacagtgagaagtcaaacgcgaaaaaagatggtttcatcaccatcattcacattcttagttttttatactggggttatctcgaaccagttttcagcacattgtagcacaacactttattatattcaatacagactatattattttcaaaatatgaaattataatatctatttttattgccttttacttttattacagtataataaaagtatggaggtgcttatgaatcatagtaaattacaagatatgaaaagaaatcatctctatatgattttaaatgagctttatttaaatgataatgcaactattaatgaacttatcgaaaaaactgatttatcacaaccgagtataagaaatatgttacgttctttacaaaaacaaaatattattcacgaaataggttgtgatttttctaccggtggaaggtgtccaacacgttttgcattaaatactgataagtttcatttattatgtatctttattcaaaatcatattgcgcatgttcatatcatttacaataaacaagaacaagctcattttcatatcgattatcaagttgaagtagatctgattaaacaaatacagcacattattcaacaatattctattcattgctgtgttctttcagtagaaggaattgtacaagatcttacttacatcacagaccattttaattcattagaaaaacattcttgggttcagacattgaaagattctattgatattcccgtttgtttacaaaatgatgttaaggctatgcattatggacaatatttgaatcatccagtcactccatctttttatttacatattaatgaactgggaattggtggttcatatatggctcacaatgaactattaaatggtcaaaatggtatatctggtgaaattggtttaatttcctataatggcaagccattaaatctagccatcagagaatgtcgtcatcaagaacaatttaatgaattacttcgttttctattaacgattattatttctacttatgatccagcttttattcacatttcaattgataaccaatggaatacagagtccttaactttaaaagattacttattacatctttttccattaaaaattgaaaatcaaatcatttatcatcaagagtttatgaatctcatgtttgatggtttacagtacataggcattcaatgtctattaaataaaataattcaaggagaagaaaaatgaaaaaatacaaagcaattatttatgatatcgatggaacagtcttaaatactttaaatatgaatatgtatcctttaattcaaattattaaagaagaaactggagaagaatggacttttgaacaagtgttaaagtttgctgcttatccagggatgaaagttatgcaagaacttggtgttaaagatcaagaaaagacttatgcaagatgggttaaatatgtaaatgaatatgaagaaggagctactctttatgatggattcatggaagtgtttaaggcttttcaggataatcatattattcaggcagttgtttcagctaaaactgctaaacaatatgaaattgattttgttgataaagggttagataaatttatggatgttgctattttggctgatgatacaacaaaacacaaaccagatcctgaacctttattagaatgtataaaaagattaaatattgaagtcagtgaggctatttatattggtgatgctttatcagattatcaagcttcacgcaatgctggtatggattttggttatgctaaatggggaagtgtttcaagtgaagggatagatcatcctgatcttgtttttgaaagtcctttagatttattgaaattgttggagaagaatgatgaataaaataaaaatggttattactgatttagatggaacttttttaaacaatgaggaaattgtcagtcaaagaaatattcaagcgattaagaaattaaaagaaagtggtattttatttggttttgcaacaggaagacctatttgttcagtagaaaatcttattccaaaatggcagatggatggaatggtagattttatcattggattaaatggtggacatattaaggattatagattacaaaaagaagaaagatattttcagattgatggtgatattattaaagatattatcaaacattttcatgacatgcctgttaattttggaatttatgatgaaaactatttagctgtattaaaagatgattatcttgctcaaaggcttgcaaaaagtgatgatattccttatcaagttgttgattttgaagaactgctcaagcaccaacaaagtaaattgattgtcatttgtgatcctaaagatatgcctaccattgtcaaacatggacaattgttctcacatcctgctgttaaatctttacaagctggtaaaattgaatatgaatatatgcatcctaaactttctaaaagtcatggcatcaatatgctatgtacttggcatcagattgaaatagaaaatatatgtgcttttggtgatgccgataatgatgcagacatgatacatgatgttggaattggtattgcaatggaaaatgccagtcctttaaccaaatcatatgcaaaagcaataactctagataatcaaaatgatggggttgctgaatatattgaaaaatttattttaggagaagaaaaatgacagaaaaagaaaaaatgctagctggtgaattatatgattgtggagatcctgaattattagaattatggcatttgggaaaagatttagcacgaaaatataatttattagattctcatgatgctcaaggaaaaaaagaaattctcaaacaattacttggtggtatgggcgataatctttggattactccaccattctatgttgattatggatgtaatattttctttggtaataattgtgaggttaatatgaattgtacttttttagatgataataaaattactattggtgattatgctttaattgctccaggagttcaaatttatactgcttttcatcccacacattatcttgatagatttggtgatagtgctgattcagatttcaatttttgtaagactgaaactgctcctgtaacgattggcaatcatgtctggattggtggaggagccattattatgcctggtgtcacaattggtgataatgttgtcattggtgcaggaagtgttgtgacaaaagatatcccggataacactattgcttatggaaatccttgtcgtgtcgtaagagaaaacaaaagaatgcgttaaaccatagtcaaagaactatggtttttttatcttaaaatctcaacagataatttcatcattattacatataaacaaaaaaaggtatagcatttgctacacctataattcttcaccatttgtttcaataactttcttataccaataataagaatctttaggaatacgatttaatgttccagagttttcatcttcttctctatcaacataaacaaaaccatatctcttttgataaccatttaaccaacttaataaatcagtgtaagaccatgtacaataagcaagaacacgacaaccatcatcacatgctttctttaattcttcaatatgagcttttaaatatgcaatacgatatggatcatgaatctttccatcttctactttatcaaatgcacctaatccattttcagaaatcacaattggtaaatcataacgtgatgtaatatcacgacaacacattctaagtcccattggatcgattgtccaatcccaatcagttgttggcaaataatcattagctggatttttatataatcctggaattccttgaatttgtgctgttcctttctttccagttgtattcatagtattactcatgcctacaccattaatatcattatattcagcaacacatgtttgataatagttaacacccataaaatcaaccaaaacagcagcttttttcaacgtttccatatcaccaggtaaaacatctggagctaccccatgactttctaaatatgcccaagcacttcttggataacgtccataagcataaatatccatccaccaataattttgtaaatcatcataatcagccttagccatagcattttctggttttctgtcatatgcataacaaggactataagcaaaacttgcccctacttttgcttcaggataaagttcttttaatgctaaaactgctccagcatgagccatattagcatgatgattcacttgatagaaagttttcatatcattttcttttcctggtggatgcattcctttaagccatccaaatgatgtaaagatattttgttcattcatagtaatccagtatttaacacgatcaccatatcttttaaataatgttgttgcataattgacataatcatctacaatttgacgactttcccaaccatgatattcatcttctaatgcttgtggcatatcccaatgataaacagtaaccattggttcaattccatattttaataattcattaattaaatcatcatagaattttaaaccggcttcattgatttcaccatttccatttggataaattcttgaccaggcaattgaaaaacgatatgtttttaatcccatttcagccatcaattttacatcttctttataacgatgataatggtctactgccttatctcctgttgttgctttaaatgttttaccaggaattctaacaaacttatcccagtttgatagacctttgccatctgcatcccatccaccttcgacttgataagctgcagaagcacttccccataaaaaatctttagggaaaccttgtgattctttaaaatacatatatttcctccttttctttatatattttcattcataaactcaataagagataatgaataagaatcgtctttatcttttaattcatataagttttgttctttaattggaaataataatttatttgatgaatcatgattataaagtggaaaaaccatttggaatggtacatcttcatccactttagaatgaacataaacagttggaatagtattcttctttaccaaagaaacagtattcatctttttaatatctgcatttaattcatctttaatgacctttctaatgactggaccacaaatcatttttgaaaccttcaattctttttgacaacgtaaagataaataatgataaacattatcataagcaccttcactaataattaaatcaacattctttaacttaccaagtccagcagtatttaagattgtattagctcccattcctttaccatacataataatacgatgatcatccccatatttttgtaaaagatacgtattaaaatacattaaatcaaaaatatcacgataaccaaatcctctaatatatccatcacttaatccatgtgcattcgcatcaaccattaaaatattttcatcttcaaaaatactttgtaaataatcaactgtcttttgtaaagaataagctgaacataataatgaatgcaaacaaacaattgttctttttgcttgtggtttttcaatgagataagcttgtaaatataatcctttatgatttttaatcttaatcttttgagcatggaattcttcataccaatttccttgatcttctttactcaaatgttcacgatataacatctttttagcaaactgatttgctagggcaaaacttgctgttaatgttgaagctgttaatgttgaagcaacagcgcctgtaattgctaatttctttttcatttataccactccttaaaattatctgttagtaatctatttatgttcataacctgttcaaaagaacttaaacgatatttttcattttccattctagccgcaaaaaactgaatagcagtcacaagttcatctctcactttaggtcgcatctcaagtggaaaagtctgaatggggaaacaagtaaatataaatgtattataatcttcatgaaataaatctataataacttgatatccttcacttttaaccaatgaatttcctaaagctaaatctaaatcgtgatttgcgaatgttaacatattattgataacaccacgtaatacttttaaaacaactgcataatattgttcataatcattatgaaaaatgtaatagatatatgagaaaacaagattagcatcttctttttcttcatctttatcatttaaaacaagtttttcttttaatgaattaatcattgcattagtcacaagatattgtgacaataccattgatccaaaatctgtcataattgcaaatgaaaatctggcatttaaacatagagtttgaatagcttcaaataattcatccgatgcatatttataaaacttatctaaatgttcataaacaatacgtatgatttgtcttatataatataaatgaaattggtattcagtatctaaatatttagaatttgttccatcccattcatactgatataaaacatttttaaataataaattaattgaatccataaatttcttataattcttattttttaaatgaatctctaaacaaggaataaagattttgtaatattcatccattgttttttgattaatcccatgatgatatttcatataatttaataaatcacaaaaatctattggttcaataaccgttgtttcatgtgatattgttttaataaaactttcatatagagtataatgtaaagtacttttatatcctgtcttattaataattctttgcaatgcatctttaacaatatatattttctcttgttcatgtaaatcttcagagaacgtatatgttatacagtctttacattgtatttctacataaatatcaatttgtctaaagttctgatctaacatataataatgaactttaaacgctttttcttctgtacgatatccactatgataacgatattttccaacatactgtgattgattttgatctatgaaatccttcatgatattaatatcaaatcccatatatccacctcctttagtcttggtgtgcagctttaaaacgtggtaaaaaattacttcttacatattgtacagcaatatttcgtatattttctttagaatagtctccacccatcattaatgatgtatccataatttcttctgttaagattgttaattcatgatcagttaaaactatattttctaaagcaattgttgttttaacaatttctttacaatcctctaaatacacttttttatctatatcagttacatgttccatattattctcactccttgttaatcattataccacaattatgtctacattctgtaatcatgaaagaaaaaatttataatttttttctttaaatagacaaagaagcaatatgtcctattgcctcttactttatcattgttattttacatctttttttatgaaaagctattccatatccaattgcttccttatatccaatagatagaactccttgtaaatacttcctatctttgatttgttgcgcaccttttcgactgtctgaaacaatctcctcaattcttgaagaatgcttacattcaatgatgataacctttccattaaaggtatgtggataaatgataatatcagctcgaccttcccctatctctttatttgattctactatataatcactcaacaatcccatcaataatccatgataaaaggcttcattattatcatagtagctaattgttttcatcaatatatctgacaatatactatcagctgcttcttcattttcttcaagcaacgcttttacaaaacttgcttttctttcattggtataggtcttgaaataatccatgaatgaattattgtagatttcgtagacttctttattgggaataaccaattcataggtattcatatcgatttccttgatgactttcagataacctgtcaataatagaaagctatagacattatcctgattatccatctcctgataggttaaatcaagcttcaagcgcttaaccagtgattgaccttgcatcaaagcaagaaattcctgatatatattataatttgcattttctatatagctgacaaccagttcattactgctcgtattcgcccagaatgattctggttctggttttgattggatagtttttaaaacatattttaagacactccatggattatagatctctgtactgccaaaccgataaccatcataccattccttgacttcatctttttgttcaagaaaattatattcatttaataattcattcacttcctgttgagtaaaaccaaatcttgtgcttgattgttcatccatgatggaatagacattgaaattattgagtcctgtaaagatactttccttagatattctaagacatcctgtcagaactcctttttctagtgcatcattagttttcaaggctgatgaaaagacatttcttaaaaaatcaaccatttcatcataataaccatttgtataggctgattgtaatggaacatcatattcatctataagaataatcactttttgttgatagtgcatataaagacaatgtgataatttcaacaatgcatcttgaagatcattcattgaacatgttctatttttatacatctttaggatatttttatcatcgtcatcaatatagggactggtataaagctctagatttttttcgtgatatcagatatcaaagaagcaaatttatcaatttgttgatgataatcagttcttttcatatcttttaaagtcataaatataacaggatattgattctgatgtagcattgtttctttatctttagaaacatttaatccatcaaatagataagcattatctttctccttgtgagaaaagaaataataaagcatactcatatttaatgtttttccaaatcttcttggtcttgtataaaatacaagcttttcattcataacatcatttatcaattctgtcttatcaatataataatattgatcatctataatttccttaaagttttctattcctactggtatctttttcatgatgatgtgccttttctatacttagccttttatttaatcactgctattttgttttggttatgactgtttacctctaattaagatacttctagaactacagatttctgtattctcaaaaatatctcttttcatttatattagtaaccagcttctatttccatatatcttcattgtcatcttgcttaattattataccatgaatatgtataattttttatatatttataaccttttataatgagaaaaaagatgtcatttcgacatctatctcaaaaattttatttcttctgtgagttcaagtcccatttgttctaataaggccttagcttgttgatatgtttgcatatctaacaaagctgaactttcatgtgcatccgttccaataattactttatttcccacttctttagcaattttaaagaatgttgtattaggataatgacgatttgttgagtatcctaacaagttaaattctaaaggcatattggcttcctttgcaaccaaacataatcttttcatttcttgataatagaatgggtcatctgttttataacatgctaaatctggatgcgctacatagctgtataaaccagaatgaatagcttttatacagttatccacatatttcgttaactgttgttgagtcaatggtcgaccaaaataaatacctgtttcatctgtatcatcaaaatggttgcctaaaataatataatcaatgggatagttttttaatgttttctttaaccaaggcgtatatttttcaaaatattcacattccaaaccaatcttaatagaaatctgatttttatatttttctcttaatcctaacaaagtattaacatatccttctaatttatcttcttccatacgcatagttgaatgaaaagaagaatcataatgccaaggagtatgatcactaaaacctaattcactatatcctgatttaattgctgctaaaatataatcttcctcattatcaatcgcatgataacaacgttttgtatgtgtgtgataattcttcattttttaccttctttcatttctgaacgtattatagcataaaatgatcctaaaagaaaagattgcttatttgcaatcttataaataatcacatgtatatccacgcatatccaattctaatttttcaacttgccaatctttcaataaatcaccaagttcctctttaatacgcacaacaccctttgtatcatcagcatcaataaccaccataattgtaggtcctgctccagataaataagcccctaaaattctttcatctttttcaagaatattcataatttcagcaaagccttgaattaatggtccacgatacggttgatgtaaacgatccttaaatcctaatttcaatccttcatcataaccattaataagtgaagcaaccattaatgctaaatgagaaacattcgcaatcgcatcagctcttggtaattcttgtggtaagacagaacgtgatttttctgtagataatgtaaatggtggaatcaatgcaacaaaacgataatcatgtttgactggaatattcaatgttgttacaccatcactcataactgaaactgttaatccaccaaaaatagctggtgcaacgttatctggatgcccttctatttgagttgcaagttctaatatttcttgacgctcatcataacgatcaacgaatgcataagctccaacaatacctgctacaatacatgttgatgaacttcctaacccacgcgtataaggtacatctccactacattcaatacgtactcccttaaaatccaatccacaagcctttgccccttcaacaaaagcctgataagtcatattatcagcattacaaaattgttctggacatccagtaatttgtaatccttcatcaattaattcaaaagtaaatgtattataaagtgtaacagctaatcctgccacgtcaaatcctggtccaagattggcacttgttgccggaacttttactttgaccttcatatctataacccctttacttgttcaccgataaagtcaataattgaatctttatcaatgacttttgtgtgtaaaacttttctatctttcattccttgtaatggataaggaatatcaacttgagttgtttcatttaaagcatcaattgcactatattcatctaatgtttgatcagtaatagcttgataaactgattcagggaatttataaggagatgctgttgaaagtaagattgtttttgtctgatcttgagattctttttgatattgtttgtaaaccccatatcctactgcagtatgtgtatctaataaatatcctgtttccttataacactcaccaattgtttcaagaacttgattttcatttaaccatcctgctttaaagttttctttaactttagtcataacatcttcatcaacaatatatttacccgtttcatttaattgatccatatattttttaaccttactagcatcttgacataagaaataaacaagtctttctaaattacttgaaaccaaaatatccattgctggtgcatttgttttataaaattcacgattcgcatcatattcaccagtcttaaagaaatcagttaaaatattatttttattagaagcaataataaatttttgaattggcaatcccatctctttagcaatatatccagctaaacagtttccaaagtttccacttggaattgtaaagttaactgcttcccctaattccacttctccttctttaaccaaagtaaaataagaatagaaataataaacaatttgaggaattaatctaccaatattgattgagtttgcagatgaaaggaaaacatgatgttcatcacaaagtgctttaagttcttgtgaattaaaagctttcttaacagcggtttgagcatcatcaaaattccccctaattccaataacatcaacattcttaccagtttgagtaatcatttgttgtttttgaattggtgaaaccccatcaattggataaaaaaccttaatacaagtgccttcaacatctttaaatccttccaaagcagcttttccagtatccccagaagttgctgctaaaatcattacttccctatcttcacctttttgttttaaagaaaaagtcataaaatgtggtaataatgataaagccatatctttaaaagctgctgttggtccttggaataattcagcaacatagacatcgcctgcttttttcactggaacaacatttttcggaaacaaaccacttccatatgctttttgacataatcctctaatatcttcttttacatcatctggtgtaaatacagaaataatctcagttgctaaatctacataatttaaatcctttaaagcatttaaatctttttgtggcattttaaaatcaggaacaagtaatccaccatcacttgcaattccttgtaaaatagcttcataaaaatttaatggttgctgatttcctcttgtacttaaatacattttttctttcatattcattcccccaatcaattatttgtcttattgtatacaattttattttacaagtcaataatattagaaattttcaatattttctacctatttttttgattttccaagaaaaaagttttatttttatagaattatatcgtaaatttatcaaaaaatatttattattttgactaaccctcttgaatagactataatagaaaaaaataaagagggggatttaatcgtgagtaaaattatcattccaaagggatatcatccacaattaaacttaattgaaactgaagttgctattaaaatgattaaagatacatttgaaagaagattagctgaacaacttcgtcttacacgtgtttcagcaccattattcttattaaaaaatactggtttaaatgataatttaaatggcgtagaaaaacctgtttcatttacatcatttgaattaaatcatgatgatgaaatagaaatcattcattctttggctaaatggaaaagagatgctttacaccgctatggttttgaacgtcatactggtttatatactgatatgaatgccattagaaaagatgaggaacttgataatatccattctatgtatgtagaccaatgggattgggaaatggtgattgctaaggaagatcgaacaatggattatttaaaggctattgtttcaaaaatctataatgccttattagatgttgagttcttaatgattagacattatcctcaattgggtgaatctattttacctgatgaaatttattttattacttctcaagagttagaagataaatatcctaacttaacacctaaacaaagagaacgtgccatcactaaagaaaagaaagctgtttgtttattacaaattggtgatttattaaaatctggtcataagcacgataatcgtgcacctgattatgatgattggaaattaaatgctgatatccttatttataatacccaattagatgatgccttagaaatttcaagtatgggtattcgcgttgatgatcaagctttaaaagaacaattagaaaaagctaatgcgaatgaacgtttaactttaccttatcatcaaaatattatcaatcatatcttaccactaagtattggtggaggaattggtcaaagtcgtttgtgtatgttctttttaagaaaagcacatattggtgaagttcaggcttctttatgggatgaagaaacaatgagactttgtgaagaaaatcaaattcatttactttaacgatattttagcaatatcgttttttttcacactatttacatattgtattgttacaatggtaaaaaggaggaaagaccatgaagataataaaaccattgataactattttaggatttttacccgcattatactatactcctatttttcttatctttctctttaatcatattcctattatttcattaatttctactatgattataacgatatgtacgtttttagctcccatctatctcatgaaaaaaaaccatcagaaatggataggaataattgctgctggctttatttgtattagtctttttattgaagcggctttaccaaatgctttctctgtagaattatccatgggatctgctatttttttaagtattatttatttactatactattttgttttacaaaaatattaaaggtcatcctaatgatgacctttttgcttattcaatttcaatatgatgatcaatcagataaactgttaatccactcaataacaaaccaaaaacaatataataaaatccataaaacatcgtatgagatgatatataatcaccaaacactgttaatgcaatccatccgattataagattcaaaactaaatatcctataatagcaaataccatttgatgtttacgtacccattttgaatgagccaatgttaatgcaaaatagatactacctacagttataaataaatttcctaaaacaaaaaccacattgcctaagaaatctaatggataatgcaccatataattcataaaacttccagcaatctcagtaacggctgacattaaactcgacacagttaatgcttccatcttaaatgatgtcacaatcatcattaaaataaatccagctattaatacaattccagcaataatcaaccaaatcactgctgttaaaacttttgctacaattaattcagtagtagaaactggtaaagtcaatgttaaataaccaggtctttcaaagactgaacgattaaaattcataaaaatactaacaaataaagcaattgcaatccccatcagtaaaacagcaaatcctaaaccaaagattacacttataaatggtaattttgataaaaatccgtccattacataaggcatgattatgcaacctatcaaaaatgccgcaaaagacataagaaatgtacgataagaatggataaattcatatttcattaattttaacatttgaattcctccctaaatatttcatcaattgatgtttgtctttttgttcttaattcttcactatcttcatgtaaaacaacttcaccatttttcaagaaaataacttcatcaaatattttttcaatatcagctattaaatgtgtagatattaaaacaactgcatcttctgcataattttttaaaatgacatctagtataaaatctcttgcagctgaatcaacaccaccaataggttcatccaaaatataaatcttagcttttctagacataactaaagccaattgaaatttttctttcattcctttagacaattctttaatctttacattcttttcaatattcattctttccattaaagaaatagccttaccagaatcaaagtcttgatataaatctttaaaaagatttaaagcatctgttgtagtcatccaattttcaaaatatggttcatctggcaaatatgaaataatacttttagaatgaacacctaaaggttgttgatcaattagaatttctccttgatagtcttttaataaaccatttaatattttaattaatgttgtttttccacttccatttggtcctaacaaaccaataatttttccacttgttaaacttaaattaacatttttttagacttttttctttccatatgatttatttaagttctgaatacgaattaattcttccatagtcatcctccttaagatattgtagtatttcttcttttgaaatacctaattgctgcatttgttcaataaataaagttataattttttttatttgcttatccctacattcatcaatcaatgcttgattatcagccacaaatctacctactgctctttctgttcgcataaaaccttcacgttctaactcaacaaatgctctttgaattgtattaggattaacttctaatgtacttgccaattctctaacagacggcagtttatctcctggttttagcgttccattcataatttgcatttttatatcatccataacttgaagatatattggagtatttgcatgaaaatcattcatatttatcactccttactgtattaatacactaatacagtaacacagatgtttcgcgctgtcaataaattgtgtaaattattaataattttaactataaactctatttttgtttatactaagattatgatataatatataccaattggaggttatgattatgaaagatggatttgtaagagttggatgtgctagctttcctattcaattaggtcaaatcaaagaaaatgctaaaaatattattgaatatgtaaaaaaagcaaatgaagaacatgtgaaggttttagtatttcctgaattgtgtttaagtggatatacaattgaagatttattttatcaaaagcgtattttaaatgaagtcacagaacaaattgatatcattttagatgagacatatgaattagatatgttatttgtaattggagcacctttagttcatatgaataaattatataattgtgcgattgtcatatgtggaggagaaattttaggagttgttcctaagacatatattcctacctatcatgaattttatgaaggtcgtcattttgctagtgcacctcaagagtgtactgagatattcttaaacggagaatattatccatttggaactgatatgatttttgaagcttttcaacaatcgcatttaaaaattgctattgagatttgtgaagatttatgggcacctttaccaccaagtacaaaacattgtttaaatggtgcaacattgattttaaacccttctgcaagtaatgatttaacagcgaaatcagattatcgtcgtttattagtatcttctcatagtgctagacttgtttgtggttatgcttattgtaatgctggtttaggtgaatctacaactgatgttgtttttagtaatcatcatttaattgctgaaaatggagcaatcttagaagaatctattcaatatgaagatggacttatttatactgatttagatctagataaacttgtaagtgaacgtgttgagatgtcaacatatcaaacaagaaatgatcattatcattatattccttttgaaattgatgatgaagatttagaattagagcgttattatgatcctcatccatttgttcctagtgatgaaagccaaagagctatgcgctgtaaagaagtctttgatattcaaattcatggattaatccaaagattaaaagctactcatattcaaaaagttgtgattgggatatctggtggtctagattctactttagctttattggttgcaagtatggcttatcaaaaattaggttatccttcttctgatattattgctgtaacaatgccttgttttggaacaacttcacgaactaaaaataatgcattaaaaatgatggaagaattaaaagtaacttcaaagactgttgatattaccgaggctgtattacaacattttaaagatattcatcatgatgaaagtattcatgatgtgacatatgaaaactgtcaagcaagagaaagaactcaagttcttatggatattgctaatcaagaaggtggtattgtcattggaacaggcgatttatcagaagttgctttgggatggtcaacctataatggtgatcatatgagtatgtacgccgtcaatgtttctgtccctaaaacattagtaagatatcttgttgattatgtttctacactttataaaggtcaaccattagaagaaactttacaagatattcttaacactcctgtttctcctgaactattgccagctaaggataatgaaattgtgcaaaagactgaagatattgttggtccatatgaattacatgatttctttttatatcatcatgtaagatttcattatgagcctagaaaactttatcgtattgcttgtttagcatatcaagatcaatatgataaccaaacaatcaagaaatggctaacccttttctatcgtcgtttcttcactcaacaatttaaacgaacttgtattcctgatggtccaaaagttggtagtgttgctttatctcctcgtggtgatttgagaatgccaagtgatgctaatgttcaattatggttagaagaatgtgaaaagctataacttcaaaatccatctttatgtgaaattatgtgaagtagaaaataaaaaagaaatttgccctcttactctcgtatatagaagtaggagggcttttttatgataatgaaaagaaagaaaattgttgattttaaaaatgatgttttgttcaagtataccttgagagatgatcaggaccctgattctatttatcttcttaaactcatcattgaaaacatcgctggcattgactgccattcactcaaggtcttgaatcccgatctcaatcctcagcatgtcgaagacaaggatatgattctggatatcagagtcaccaatgaagatggtgaaatctgtgatgtcgagatgcagaattcatcacttgaccaggagcagtatcaaaggttccagatctatggagcaagactactcgtagaacagcaaaagagaggagatgactatgtcaccaacattcatcatgtgtttcagctgatattcatcgatgacctggataaggacaatctggtactaatagacaggtatatcagtcagaatgaatcaggaaaccaggagaaacataacttgatcacgagaatctacatatatctaccctatatcaatatcctaaagaaggaaaagggattagagaacttcaatgaactagaaacagcgatctacatatttaaaaatggaatcgatgatgatataatgaagttaaagaagaaggtggtggatatcatggagaagaaggcagatgattttaatgaagatatgattctacaggatatggcattcaaccgtgatttaaacaagcgagcaagacaggcaagaatgaaaagagaacgtgatgaaggaaaagaagaaggattgactgatggactaagatattctgtattaaaactgtttatcaagacatatccacaagctgaaacaggatttctggaaaacctatccgtggcgcagtacgaaaagatatttgacttacttattgaaaaagcgagtctagaaaagatatatgaagctgcagattgtataaaagagtaaacttggaataaaaaggaagtttttagtaaaagagacttccttttttatatctctatttataaaaattcatgatgaatgccttgaataaattgattgacagtactttgataaacacttttatttaaaaaaatatgattttaaaattcggaaaatttaaacaattatgatataatctttgatgtttaaggaggaaaagatatgaaaataattaagggcctcaatcattaccaaaaatgggaaattatgataaaagaatgctgtaaaaatacaaaattacatccttttgaaaaatatataattatctgtgataatccaagagttgttgaacaacgcttttttcaatacacacattatcttgttaatattgaagttataacttggaatcaatttttaaaacaactacaaattaatttacatcttactaaacatcatattgctagtactgtagaattaacttatcatttaagaaatattttaaaaaatgaatcttttcattgttttgaaagtgctacaccttaccccttaattcaagaatttattcctttaatcaaatattttgatatcaatcaaacattttatcaagaagatgaatttgaaagtataaaattaaaagattttgcccatctttatcattcgcttttatcatgtcttaatcaatacacccatataacattagaaagtttctttgactgtattgatttttcaccattagaaaaaatgcatatttacattgatggagatcatctttatgaaaacaaaagacaaaatattatcaagcgtctagctcaaaatcatgagataataatgagttacacttatcataatgatcaaagaattttcaatatgccttatcatcttttctgtaaagatgcaatggaaattgatcaacctacttatttaacacaatccttatttttacaatctataacaccttgccaagaggaccacccttactatacatttactgcttcaacacctaaacaagaaatcaagcgtgttgtttatagtctttatcaaaaagttgttgatgaaggattacgttttcaagattttgtgattgtttatccagatagtagttatatgaacgatttaattgatactctagaacaattacatattcctcattctttaccccaaacatatttaacacaatatgattacagttatcaaaagattcttaaagctttacaagcatcaactcagacaacttttcatgagattgcaaaaaatcttttattagaagaacttgatgcaacatatcaagattatcttaagcaattattagattatcatgaaacaataacacctcatgaatttattgatttctttaaatcaacatatccaaagcaaactcaagaactcaatctttataaagatcatgttgaagtttgtacaattgataaactttcacttagccatccaaagcatatcttctttttaggaatgaatgaaacaatttttccacatttaataaaagatacatctttgcttttagatgaagatattgagttgttgagaaagcaccaaattcctaccccactttctacaacagaacaattaggggttcatcataatgacattcttaaagcgttcttacaaccatcttatagcatgactttttcatatgcccttcaaaccttatcaggagaagcacgtttaccttcttcgctctataaacaattaaatgacatgtttcatttcaagccatttatgacaaatcaatttttatcattagatgattattatttaatgggtggtttagatcaaaacaagacaattttaaatcatcatattcatgattataaatcttcaaaaaatcaacctgttaccttatctcaaaatattgttgcgaatctttatagtccaacattatcagtgagtcaaattgaaacttacaacaaatgtccttttctttatttcattcaatatggtttaggcatttatcctttaaaagaacaacaattaatgcctaatgagttaggaagtcttgttcactatgtcttatcaatcaatattaacgatcagcaagatatctcacaactggttaatcaatatatagctgaagatgaagtcctatctcaaaagattgtgacatcaaaagtcaatcaatactttattgaacaattgaaaaaagacttaaaaatcactttaacagttctaaaaagacaattaaacatttcatcttttgctgttcatgacaaagaaaagaaagttcaaagtgatatacaaggaatgcattttaaaggatttgttgatcgtattgatcaatatgaaaattatgtttcaattattgattataaatcaagtacaaaagatattgatttaaatcttgctatgcaaggttttaacattcagatgttattgtatttaaagatggtcacagaattatatcaaaaagatccaggggcagttctttatttcaatactaaaaaacgtattctatcaatcaatcaaccaatgagtgaaccgattgatgaatcagaattctataaacaatatcgttatggtggatatgtgattgatgatgaaagtcatagtgttattcaggcaatggatccaacttttgatagacgttcagatattattaatgtttcttatgtaaaatcaagaaatgaatataaaggacaaatattgacttctttacaacttgaaaaattactagaagaaatagaaaaacatatttatgaattatatcaaaatatgttgaatggaaatattgcaattgatcctaaaggcagtgatcaaaatgctacacatactttagtcaatccttgtcattattgtccatatcatagtgtttgtagttttgatgttttctataatgactatcacttggttgaatttttagatgttaaaaagatattaggaggtgaagaagatgccatttaatgaaggacaattaaaagcaattcaacaaagacattcttcaattcttgtgagtgctccggcgggtagcggaaaaacaaagattcttgttagtcgtattgttgaactactcaaagaaggctatgaaatctttgattttcttgttttaacttttactcaagccgcaggaaatgaaatgaaacaaagattaagtgaagaattgaatgaaattgtctcatcagatattgatgaagaattaaaagctcatcttcaaaatcaaattctccatcttcctcacgcctatataacgaacttccatggtttctgtaacttattgctaatgaagtatggatatcttgttaatgttatgcctggttttgaaattaatagtgatccaactgctattaaaaaagaagtcttaaaagaatgtgaagaaaaatggattgagaatgatgaaattaaacaattcttagaattatattttccgggttattctttaagtggatttgaaagtttacttttatcagttgatgagatgtcacactccattgataatttttatggttttattgatacaatcaaaactcaaaattatgataccctctcatcatcactagaagattggccactctttccctatcttcaacagattttttataacgaaactgtgctagcaatgaataaacttatagaattaaagtattattgtgaaacacatgacttaattgacttctatgaaagacctgatgaacaaactgaaaagaatcaagccttacccgtgccttttgaagcttattatgattatttagatgagcgaatcaaaatttttaaacaacaattaacatatgatacgcttgtttcaatggtaaaagcaccattacctaaatcatataatatgtcttggaaggatattgaacctgaatacaaaaaaacttttacaaagatgaaaggtgatattttctcatcttataataaagctgctcaatcttatttagaagataatccagaggatttcgtaaagaaactaaaggtaagctatgaagccattgatatgttattgtctaaagggaaactgctttatcagtttcaaatggcttatcaggcaaaaaagaaagaactgaatcaattagatttctctgatcttgaaagatatgctcatgagcttttagaaccagaacatggaattattgatattttatatcaccgtttaaaagaaattatggttgatgaatatcaggatacgaatcaaatacaggaatctttattacttaaaattgccaattatcaagacccacatatccctttatttatggttggagatatgaaacaatctatttatcgttttagacaagcagatccacaaatcttttctgataaatatgataccttttctttaactgatgaagattgccaaaagagtcaaacaagaagaattgatttggtttttaattatcgttcttctaaggttgttttagattctattaactatattttcaatcaaattatggataaagagattggtggtttagaatactatttagatgatagcgcacgtttaaactatgactatatgggaaaagaaaatggtcgtaaagaagaagcaagagcacgtttctttcaagatgaaaatcttacaactgaaattttaattgatatttataatcctgcttcttctttagacaaagaacagtatgaagctcatatggtagcgcaaaagatattgaagttaaaaaatgaaatgaaaattaatcaaaaacctgttgattataaagatatggttgttttaatgcgttcaactgtttctttcttaactttcaaaaaagtctttgacttgtatcaaattcctaaccatattgttttatcacaagggtttatgaattctaatgaaatagaaaatatgatgacttttctaaaagctatcaataatccttatgacgatgttgctttactgagtattcttagacaaccttatagtatctcttgtattcctttagatatgattgctagacttcgtcaagatgataaagaatcgccactttatgaatgtttaaaagtttccagtgagcctgctattcttcaatttttagaagtctatgaagaactaagaaactatagttattcacattctccttatgaattgatgaaaaaaatttatgaagtgacggactacccattgtttgttgcacaaatgattaatggtgctcaaagaaaagcaaatctagaattattcttagatattattttacaaacccaagaacaagcaccttatcttgatgaattgatagagtctttgagtaactcatctgattatgctcctgccaattcatcttcgggaagtgataattacgtcgagtttatgacaattcataaatccaaaggtctagaattccctattgtttttgtttgtaacatgcataaacaatttaatacccaagatagcaaagaacgtcttatgattgataaacgtcttggaatcgcaatgaaaccaagagtgaaagtctcaactgatgaaattgaagatataacggttgaatatgaaaactgttatcgtaatatgatagcaagacgtcaacttgatgaatcagtgaatgaagaaatgcgtattttgtacgttgcattaacacgtgcttcacaaaaactcattttaactggtgttataaagaatattgatgaaatcactgcaatccaagagaaacttttagtcaacgaagattctgatatatatcatcgtgaaaatgctcaacatattttattatatgatcgcctaagaaaaacaaacaactatttaacttgggtattatcagctgtgttacgtcatccaatgattatacaacaatgtcaaaacattgaagccttaaaaccaagagcgcaacaattagaaaaatatcattttgaaaaacatatgacatttgattcaaccgaacatgctatgttttcattagctcttacaacagatcatgaaattgaacaagccattccacaagttacttatgaaaacaaagtcattgatggcactatccaatctcattatcgtgattatgtttatccttatgacatacaagatcctcttacaatggctgtaacacaattacaaaaaatagaagatgatcactatctatcattaacatcacctgatgaagcaacacaaatagcagcaagtgataaaggaacattagtccatctcctattaagttatttatcatttcaagatgatgatatactttcactgattcaacaattatatgatgaagaattgattgatgaacaagggaaaacaattcttgaagaatatcaagataaaatacaaggttttattgatagtccttattatcacatgattcaaaatgctcaacatgtctacaaagaaaaagctttctcatataatgaccaagaaagaaagcaaattattcatggcatattcgacttagtctttgtctatcaaaacaaaatttatgttttagattataaaacagatcgtgtctctataaaaaatagtgatgaatctttaattcaaaaacatcaagttcaattaaattattatcaaaaagttttaaaagatatgtatcagcaagatattcatgcgattgtttattatttaaatattgcaaaaggagtagaattctaaaatctactccttttcatttcttatattaaaaatatcttcttcttttatttctatatgaatatttataagtcatatttaatcttggtttattttttgaaacaatatataaccccatacactccataccaattaacatagcaaacattgatgacaattgtgataacacttctaaatgtaaattcagcattcctaaaacaagtgcaacaacaaaaatgataagactaaaaataattcctaatttcatcattaccgttccttcactcttatgtaaacaataaaaccaaattccaattagaaagcctaaaataagtgcagccacaataactttatattcaaactcaatagtatttataattccaacaaaagcaagcataatatagggtaaaattattccaaaaattttattcatatcaaatgacctccatgatatttaattataatcgacaaaacctgctctttcaagataaataaaaagaaatagcacttttgctatttcaataacgaatatactgtttataggattgtttatatataatacttatcactaaaattgttataaatccccataatccaataacaatccatctcataggtataacaaatgcttcactaataatataaggtgaaccaattcctaagatattattttctaaaaaataattatagaattgtatcatatttataggtagacaaaattcaaagaatgttttcacaaaacttggaatataaatcatttggcaaaacattcctacaataacaagaataaataaaggaataataactataaatttcttttttaatacataggataatcccatagaaagagttgccattgcgattgccccaaaaagtggtaatacaattgcatagatgaggagtgttaaataagtggttggaataattgggattacactaaagaaatctatacttgtaacgagaaaattccaaccatgggtaggaaaagcaagacttccaaataaataaacaataatcaattgtaagatgattaatccaattgagaaaagatatcctgttatcagttttgctattgttatacgatgacgatttgattgcgtaggataaataatctgatccatttggtattctctttcaatcgcaaagatattagctaatgctatcataataacaaatataggtaaaatataaaccatggataaagctcgaagcataaattgattaggtaaaccactttcaaattgatgaggtaacgattctacttctgacattaagtacttctgaaaagttgttgtttcttcttttgttagtttttcattttgtgtaagtgtacttgctaaataatcaacttcccaaacattttttaattgaggattcaataaataagtattccattctgatgaaatcaaataattggtatcaatattattatcaatgctttgatgtatatgtttattatgagtatataattctgataaatattctctttttgagtcatttgtataaattgtttctaattcaattgtatcatcttcttgtgtcaaatattctggactttgacctatctcgttagttatttcttgaatatccttttgagatagtcctgtctttttttgtttttctaaataatacttccaattcttcccataagctttagtcattgctttttcatctatttgatctcttggatattttttcaattcattttttaaatcttgaataatttgtttttgttttgcttgtgaccattctcctgaataactgtgcataactgcatctttcgctttacaaaactcaagatcacttaactgttttccttcaagatttgttaaattatagcctacatttttataattatcacttccataataaactttataacaaatccctatacttaccaatatacttatcaatataaataatcttataaattttccttttaaaagcttttgaaactcactttttattaacctaatcataagcaacttcctcagcaaaataatataaatataaatcatctaaatcaggaataaccgcaattgcttcatcatgtggttttaaatcagatacaattctcatataaactccattattttgattatgacttttcacaacacgatatcttttcataaatgatgaagcttcttgcttaggaaccaatacttcccaaactttgcccttaatcacttttatcaaatcttcataaattccatgcataataatctctccttctttcataatcagaatatcatcggcaatactttcaatatcacttacaatatgtgttgacaacaaaataattgtagattgggataaagaagcaatgagatttctaaaaacaatacgctcttttggatctaatccagctgtaggttcatcaagaattaaaatctctggttcacttaataacgcttgaataattcctactctccttaacatccccccagataaagttttcattttcttattcagttgattctctaaacctaattctttgactaaacttaagattcttttttcactgtaatctttatttaagttttttacaattgccatataatccagaaattctttaagtgtataatgtggataatagccaaaattttgtggcatatagccaatatgtgaagcaaagttttcatattctagtgaagcatctatatcgtcaaaatgaattgacccctccccctttaaaagcccacaaatcaatctcatcaaagttgttttaccacttccattagcacctaacaatgcatgaacccctggctttaaagacacattcacatctttaacaacatcattctctttatattttttagatacatgttctaatgttaattccatatcaaatttcttcctttcttttctttatataggaatgtgatatttccaatataaataaaaaccataactattatagcgatataacatgttgatactgatatatacgaaacaatatttaaataatcaatcacaaaaatcaaacttaaataaatcataaaataactcattaacacaccaaaaatatttgttatgaacttcataaattgtaatgataacatttgtgatatataaactggtaataaagcataaaaaatagttttaataaatgtgatttgattaaatggtatcaatatacatataaaaccaaacatacctagttgcaaaatcgctatacctacgcttttatataaaaaacttcttccttcatttatataagaaacagataaaagttccttaaccccataaatttgatttttcatatattccaatattgcctgacttcctagaactaaaaaataaagcataatacatacagttgttgcatcattcataaaataactgacaagtgtaatcagtaacattcctattactgatataatcatttgatttttcatttctactttcatatattgataaattgtttgtaaatgatgagtattatatttattcacaatcatatctaattcttcatgacaagcttcttttgttttttgtaatgctgtataatcaatattcatctatatgctctccttccatttgttttttgagctgaattaaagcttgataatgccttgtttttactgttgaaataggtatatgataaatctctgaaatttctttaaaagtatattgatgataatattttaaaataataatatcttgcatagctggttttaattcatatattgcttcttgtaattgtgtacttgtcatattctttataatcgtttcatgtacatctattgtttcatcagctattaattcatcttctaaaatcaaataatttttttctttcttataatagtcataacaaacatgacttgcaatcttgtataaataatttaatactttgccttcactatgatatgttggcaatgctcgtataaacctaacaaacgtatcttgagtcatatcttttgctatattttcatccttaattttatggcaaataaaacaataaacttgaggatagagtaattctataaaatgatcaagggccctatgatcacctttttgaatacgtcttatataatatttctcgttcattttctccctcctcacccttataactgtttaaaaacaaaaaaagtttgactttttaataaaaattataaaagaaaataaaaaaaagacaaatataatattaatatctgtctttaatgttttaaattcacttggaacgaaacgcctctttctgtattatgaacatcatatgaaaaaccatgtaaatctaaaactgtcttacaaattgctaaacctaatcctgttccttctctatcacttgatacataagtatcccatattttttctttttgtttatcactcaaatgttcaccctcattttcaatggataatgtttgattttcataacaaatataaatatgaccattttgtggtgtatgtttaattgcattactgattaaattcttgataaccaattccatttcaaataaatctgcttcaatcgtagaatattcaccagtcattacgacctgtatttgtttcttttctaaaagtgaagcaaaagattcaatgattgttgctaatatatcttctaaatctaattcttgaatatgaagttctacttgtccagactctaatcttgataaatctaacatggctaaaattaattggttaatcttatctgtttcttgattaatggcttctagatatatagatttcttctgatcatcttttgtttcttctatcaactctatatatccattaatgattgctagaggggtttttatttcatgagtaaaattagctataaattcttttcttaatgattccaattgtttgacatgttctatttcatcattaagctgttggatagttaattttaaacgttgactcatatgattaatattatgtgacaatgtccctaattcatcccgtggtttttctgataaagaaagatcaaaatgattatctgcaatctgccttgttatgttatctatttttttaatacgtcttgttaccatataagatatacctaaactcattaagaaagataaaatgagagaaaagacatagacctttatattatcatatatagcttgtgaaaaagcataagtaaagacatcaaaataataatcaacaaaaacaacgcttagtgtcttttgatcatttaatgttatatagattctttgtgttaagacaagattattatccattttttcataatcaatcttaaccattccaacaccgcccatatcatgatttaattttaaggctgcttgatataatatttgactaaactctttatcattcataacataagcttcttcattggatgaactatagtaatctctataaaagagatgaggactagaatatatatgaacacaactagtctgtctattttctgttttatcttctaaatagatttgaccatccactgataaataagttggctctatctcctctcctccattttctacattgatagtttttccagcatattctacaacaatagcttgatctttatattgattttgaatatttttttcaatcgcatctctttgttcttgagaaagtttatcaaggttaatccgaacgggaatatagtcaatatattcatcagtttttggcacaacaatcatatatggtttttgggaaaagttttcatttttcattgtttcataaataacttgattttgttcatctaatactgcacaatacccattttgatcctcaaacaatttttctacactttcgactatctgagaacttgttgcttgatatgttttatcttcatattttcgtgctaataaatcaagtttgtcaacgatatctttattcaccatattgtttgctatgcttgcacaattattttgataatccatataaacattaattgtttcaacaagaaagaatcctataaaaataaccaaaaatatttttttaaataatgttagtttcaatactttcatcaatattcaccaccttaaatatatatcctgtcttaatgactgtttgaatataaacagaatactttcctaatttctttcttaacttcttaatatacgtatcaaccgctcgtccatcaccataataatcataaccccaaattttatctaaaatctgttgacgtgttaacaattgattatgatgattacacaaataaagaagtaattcatattccttatgagctaaaataatagactgtccatcaataatcaaaacatgattcattttgtctaatttcacatgaccaaattctaaatacatttcttctattttttgatctcttttcatcattgctaagcactttaaataaagaatagatggtttaaatggtttcgttatataatcatcagcacctaactcatatgccatcacttgattttgatcttcagataaagcacttataaaaataataggtcttttggtttttatccttaattgtttacatgtttcataaccatcaataccaggcatcataatatctaataaaactaaatcaatcgattcattcattaattctatagcctcatatccattacatgcttctaccacctcaatatcctttaatgaaaaatattctttaataatatgacgaatatgatattcatcttcaactaccaatattctatacatcttatcactccctaatatcatcttatcacatatctgtgtaatcgaggtggaatgattaaaaaaggaatgcctattcgcattcctctttcatttgaaaatagaattgtacgcctgcttctaaattctttactccataatcataaccatgcatttctaatatcgattgacatattgctaagcctaatccacttccttgatgatctcttaattcattaacaaccctagcaataatatgagaatcaataacaatttgtgtatcctgtgaattcttaatttgatgaatcaataattcctttacttttttgatatcaccaaaattcccatattcattctgatccaagctatagtttataaaataattttggctaagatattgtgttattgtatattcctttttttcgatactcttattatcaataaaagtttttccattaatattaaaatattttaaatctttagcttctaaataaatttcatctttcactaattgtaaactatcattatcaatagttactgtactttttttattttgattcatattttctattaataattcttctatttttgctaaaatcttattatctaatgaatacaaatttatataatagttttgatcattattgaaaaaagatatccctctttgcatcttcttttcatttatccaataatctccagaatcaacttcattgtaatccttatccagtatcatacaattatattcattcaaaatttctgtctttttttgaaactcgtttaaaaaacttttatcacaaacatgactatacttcttatcaaataacttattagcagtaatgacatctggcattgttttccctatttgcaaatatagtaattctttttgataattaacttcactcatataactttgattcgcatgaaaaatctcaatacctaaaatcatgcagaatatacttaaaaagacttttttaaacaatgttaatcgaaaatgtttcttcattattaccaccccctcaccttattgtaaaatcccttatgaaaatgaaatgtcattgaaaaagaaaagccaatctataactaacattcctctttcatttgaaaatagaattgtacgcctgcttctaaattctttactccataatcataaccatgcatttctaatatcgatttacatattgctaagcctaatccacttccttgatgatcatgcgtcacaaatgtataccaaatatcctctatttcttcttcatctattaaacttccactattatagactgcacatcctttatctatcgtgacttcgatctgtccattatctggggtatgcttgatagcgtttgacaagaagttatgaattactgtttctagtaacttcttatctcctttgattcttgattgtatattattgactttaacaacaatgttctttttcataaacaagacttcatattcatctataatctcagttacactatcttctaagtcaaattcttcaatattcatctctacttttcctgcttctagacgagacaaacttaacattgactgaatcagctgattgatacgttttgtctctcgatgaataatcgctatatatttttctctttcttcatcactttctgcttcttcaatcaattccccatagccattaataattcctaaaggtgttttcatttcatgtgtaaattgattaatgaaatcttttcttagtgattctagttttttaacatgttctatttcatcatttaattgttgaattgtttgtttaagctgatgactcatgtgattgacactttttgctaaactgccaatttcatctttagacttgatatgcaatgtttcatcaaaatcattatgagcaatctttaaagcaactttttctacttttttaataggtttagcaatcatataagaaagaataagggaaataagaattgcacatattaaggcaataaaatatagcatattattttcttctatatatcttgcaagaacataatcttgaacattctctactacactaacaatatagattgatgcattatcatctcctatgtttgttaaaaagaatgtttgttgaccaatttctcgcatgtaggaaacatagcttccatcagcaccataataataaggtggagttaggatactttctttcattgaatcaacatcgacaagtattggaatttgttttagtggatcaacagtttgtagttgattattgatacaaaacgaagttattctaccatcttgataattctttgttttttgaccatataaaatattttgacattcaaaatagactaaacgattattctctattgtatattttacatctatattcgaataatcatcagcatcatttgtatatagacctgattttaataatgaaagtaactctgctttttgattatcgtttaaagtttcaattgatatacattggctttcttttgtttgattagaatataagacaagataattattcacaaaatcttgacccaatgtataatattgtattttttgattttgattttcattatctttttggcagataaaaatataattccaatatcctggacaaatcgtttgtagctttttttgaaaatctttattttttaataactgaaagatatctttttgatttatcccatattcatccaataaatcagtaatactttctgttatttgcttataattatattgttctctaatccaagataaatataaattcttctgtgcttcaatattcaacttagcagaaatacctaaaatcaacataaatccaaccattaaaataataaagattttagcacttatcctatgtttcatgattttcaccctctttaaagacataccctaccttaaaaactgtttcaatataatttccatattttcctaacttctttcttagttttttaacataagtatcaacagctcttgcttgtccatagtagtcatatccccatatcgcatctaaaatttgttctctttctaataattgatgaggatgtttagtaaaatattctaataacagatattctttatgggttaattctaaaacttgtccatctaataagacttcatgattattataatcaatttgaatatgggaaaaagtcttatagttggatgaatttgaatcttgtcttttgcatattgctaaacactttgcatacaaaactgaaggtagaaatggttttgttatgaaatcatcagccccaagttcaaaagcttttaattgattatcctcatcacttaaagcactaataaaaataataggtgattgataatgataacgtatttgttgacaaacctcatatccatcaataccaggcatcatgatatctaataaaacaagctgaatatctttattcattaatgataaccccatatgtccatcacttgcttcaatcacttgaatatgccgtttatcaaaatatttcacaataatatttctaatatctaaatcatcttctattaataatattttatacataccaatcaccttctatctttattttataaatcacttgtgtaaattttgtgtaaaagaaaaggattgaaatatcaatccttattcaccaataatttccatcattgctttatggaaaacttcagttttacttgctgcatcatcagcagttgttcctttaatagagaaatagaacttacattttggttcagtaccacttggtctagcagcaatccaagaaccatcttctaagtaatatttgagtacattagattttggtaaatcaattgttgtttcactaccattttcatatcttacacttgtttgataatcttcacttgcaacaactttgacaccaccaatttctgtaggagcatcttttcttaaattatccataatttctttaattctagcagctcctgcagctcctgctttagataaagcaatttgagtttccttaaatgtaccatgttttgcatataattcatttaagatatcaactaaatctttaccttgtttcttataatagttaccagcttcagcagctgttaaaacagcttgaacagcatctttatctcttacgaaatccttaacaacacatccataagattcttcatatccaaagacaaatgtcttttcaccagtcttttcatattttctaatcttatccccaataaatttaaatccagttaatgtcttttcaacatcaacaccataacttcttgcaactaattcacctaaatcagaagttacaattgtattatacataacggcattatcaggtaaagttcccttttctttcatttgacttaaaatatattccaaataaacagccgcagattggttaccactcattaatacatattcaccatcatgtttagcaacaacccctaatctatctccatcagggtcacagataaccacaacatcagcatccacttcttttgcttttttaattgctaattcataagaagcaggtacttcagggtttggtgattttgtatttgtataatcaggatctggtgcacattgtgctaatactggcacaacatcatatcctaaacgacctaaacattctctaactggaatattacttgttccatgttgtggtgagaatacaatcttaaatccactcttatccataccaggattaatttcaattcccataacttctttataataagcttcatctacttcatgtccaatccatgtcatatatggataagcttcttcatcactacatacttttacatctaattcatcttctacttcattaacatatttaacaactaaatctccccattcaggaatcaattgacatccagtatcatcataaaccttatatccattatattcttttggattatgagaagctgtaatcataattcccccagcacattttaaatatctcacagcaaaagataattcaggtgttggtcttaaactttcaaaaataaatgatttaatcccataagttgctaaaaccttagcgctttcaattgcaaaacgataagacatatgacgattgtcatatccaattgcaactcctctttcttttccattttccaatcctaacacatatttagcaaaaccaacattagcctttctaattgtgtagatattcatacgatttgttcctggtcctaagattcctctcattccagctgtcccaaattcaacattcgtatagaaggcatcttctttttccttttctcccatacttgcaagttctgctttcatggcttcatctacagcaggatgattaagccatctttcataatttgtattataatccatattgttcacctcttgtttttattataccaaatccataaattgaaagccactaaaaccacatgatattttataacaaattttgaaattatcttcgatttaataattctctatctgatttattaaactcacaacaaaccctgttgatgagtcaaccctttgcataagataaaccatatttgattgattgaccccaacacatcccatagtataatttcctcttgcacaatgtaagaaatatgcaaaaccttttcctttaatacaactactattataattataagataaaaaataattataactacctggataatctattaaatgttcatcattaacatgactacactgactatgatccatctgagtttcatcaacaaattgattataatattgatctccacaccaataatgatgttgattaatttgcgtatacgctaagacactacctggatttgctttaattccataagcatgagtaaaatgaaaaacgcccatcggtgttcttgttgaattttcacttccaactcctattccagctttccccaccaatccatttgttttcattttttcaacccattgattattctgcttttcaaaatattgaacaacacatttccttgcctttgctttcgcagtcacaataaccattttatttttaccctgagctgctttcatcttatcaactgtacttgttaaaacatattgataatctttttgatttggctctttctttgtttctttttggggttttgttgtattattattttgagaagttgtttcttgttctttttgatgaactgttgaagttgttttttgtattggtttttcctctttaacaacaactaataaatctttttctgttttattttgatgattatcgattgcagtaaaatgaattttatatgtacctggttttgaataatctatagattcatgataagtataataagctaaactttcttttttaacttgattttcttttatatattttaaatttccatccacgggatctttaattttttgaacatattttaaaacatctatcttttctttagggttgattgttattttatcttttttaagttcaataattggatgttttgtatccttaacctctatatcaaactgaaaatctttctttgtttgatccaattcaacagcaaatgtcaaactttgttttcccacttttgatgtatctaatttaggataatctttaataacgccttgcacatcctttactaaatttgatacttcaaacgaatctccatattcaacctctttgatatcttgaaacgttaacataggttccttcttctcagtctcaatcttttgtgaagaacaccccatcaacaacatcaaagccaatcccataattgcctgttttttcatctttcctatccccttcttataacatctacacatttcccttgaacactactaattaaatcatctggttttaagataacttgcaatccccttttcccagcactcacagcgaccttttctaacaacaagatatcttcttgaaaataagttggaaacaatttcttcatgcctattggcgaacatccccctctgatatatcctgttaaagcaagtaaatctttttgatgtaacatctctacactcttatgtccactctctttagcaagtttctttaaatctatctctgccatcacaggtatacaacaaaccagatacccctctttatattttaataccaatgttttatatatctcatcttcacttaaatcaacttgtcctacaatatgttctccacttaaatgatcttcatcataattgtattctcttgtctgataatcaatatgtttttgatctaaaatgcgtaaagcatttgttttcactttcttcatcatatccctcttttttatcacaatttttctatcattattataatatttttaaaaagaaaaagcaaaaactcaaacaatagatatcacaaaaaaatcatattaatatctatatttaaataaatctttgtttttaaaacagattttgttttataagaataaagatgctctttttaaaacaaaaatgtttcaattcatttattttttgatacaatagtaaaaaaggatgtgaaaacatgaataataaagaaagatttattgaaatttataaacaaacgatccatcgtgatggtagtgaaaagcttttagaatttttgttatcgaagaactcggatttctttgatgctcctgcaagtgctagatttcatggaaattatgatggtggattggttgaacatagtttaaatgtttatgattgtttaaaagattatttatcacgtgaacgtgtgcaatctacttatggattaaagtataatgaagaaagtattgcgattgttgccttgcttcatgatttatgtaaaattaactgctataaaaaaggatttagaaacgttaaagaaaatggtcaatgggttcaagttcctacttatgaatataatgatactttaccttatggtcatggagaaaaaagtgtctatatgattagtgggtatatgcgtttaacaagagaagaagcttttgcgattcgttatcatatgggattttccggtagtgaagatgctagaaatgtcggggctgcctttgaaatgtttccacttgcatttgccttatcaacagctgatatggaagcaacatattttattgaaggaaagaaataagcaagagtttaagctcttgtttttattttctttagaatttctttataaatttagcgagctgttttttctatttaacgttcatactatgaattgttgataggagtgataattatgaaatttttaaagcaacatcaaaaagaaataaaaggaattggtctatgttttctgattatggcaatcgcatgtttattattatataaacctatgatgagtctatttcatgatcctcagttattaagacatcaattacaagaacttggtattttaggttatttcatgatgagtttactaatagctttacaagttgtctttgttttcttaccaggtgaaattattgaaattatgtctggttatttatatggaccaattggtggtatgatagcttgtttgattggtagtgctattggtagtagtctcatttatgtatttgtcaaaaagtttggactttcttttattcaacgttttattgatactaagaagattgaagaagtctcttttttgaagaataaggagaaaagaaatatgttatgttttcttattttctttattcctggtactccaaaagatgctttgacttattttattccattaactgatatgaaattatctactttcttattcattactactattgctagaatcccatctattattacaagtacaattggaggacatgcgattggagtagaaaattatattttctctatcttggtatttgtggttactggaatcatttctttagttggtctttatgtttataagaaaataagtcaaaagaaagtcatgaattataatctttagaaattctttagatttatctctacttttctttttcaaatttcagtataatgtatgggaaaagtgagggataaacatggaatatacaatattaattgttgaagatgaggtagaaatatgtaatgcgattgagatttatttaaagacacagggatatcgtgtcttaaaggcacataatggacaagctggattagatatcgtatcacatgagacaattcatttagcgattgttgatattatgatgcctgttatggatggtattcaaatgacaatgaaaataagagaaaaatatgattttccaattattatgttatcggctaaatcagaagatattgataaaattactggacttaatattggggcagatgattatgtcacaaaaccatttgtaccaatggaacttttagcacgtgtttcttcacagcttagacgttatagtaaatatttaaatatggttcaagatcatcaacaaaatgaaaatagttatattgttggaggattagaattaaacttagatacaaaaacagtaacagttgaaggaaaagctgttaaagtgactcctatcgaatttaaaatcttagaattattaatgtcataccctggcaaagtcttttcagccgacaatatttatgaaagtgtttggcaagaagatgctattagtactgatactgtcatggttcatattcgtaatctaagagagaaaatagaaattgatcctaagaatccacgctatttaaaagttgtttggggcgttggatataaaattgaaaaacaaggcagggaataaattatgaaaaagaaaaaatatcttgtaagttttatgattgttgttatattacttgcaacgagtattgggatatatttaagttatccagcaattcaatcaacaatcagtaaagaaacacccagtcaatcattgattactgaatatgttgcaagtcaaattgcacaatataattacgctattgattgttcattaaaatctaaagaaaattcaaatatagatacccatcagtatttagaaatcgttggaaattctaatatagaaggaattacaagtgaaattgaagatttcaaatatggtattaaacaatcccaaagagagcttgaaaaagaaacagatatctattatcaagctacagatatgacaaccaaaaaacaaatctctaatacaagtgatcatttaaattctattcaaaatgatcaagcattgcaaaaaaaatatcagtggtatgtacaaatacaatttgatcaagatggaattttatttgtgaattattctcacaatgataaaattcaatctcgtgagttaaataattatatgattcatcaatctcaaacttatagcgaatataatgaaagtaatcatgagataacttctgaagcttatattaattttaaaaatcctaaaaacttaactattacttatgctgttcctcaaaaattagctgctaatagtaatctatcagtctatttaacaaactatagtacctcagattatctgaaatattcaatgccttatgttgtttttgcaatagcaattattatgcttataacactaataacaccttatcaattatttaaagaacaaaaattattagatgttatttctcgtattaaatttggaatattagcttttatgtggtgtttagtcactggaactctctatgtatttagtccgtatttaatcgcagccactagtcaaaaacacatgattgatttttatcaagaatttggtattcaaaaccttgataaaatcttaactcctattatcaatataggattctggtttatcttctttatgttatttgttatttttgcttatatgataaaatatttatttcataaaggatttaagaattattgtaaagaaaatacttgtctaggttggattattagaaacagtcaaatcattcttaataagattgttgattttgattttaatgataatatcaatcgttcagtattaaaaattgttctctttaattttgttattatttctataattagtgtcttttttgtctttgggattttcttttcattagtctattcatttattatctttattcttttaaagaaaaaatttgaagatattcaaaatgattatcaagtcttattaaatgcaacaagacaattatcaaatggaaactttggagttaagattaatgaagatgttggtgtatttaatcctttgaaagatgaatttacacatattaaagacggctttgaaaaagcagtcaatgaagaagtaaaatcacaaaaaatgaaaaccgaactcatttctaatgtttctcatgatttaaaaacaccattaacttctattattacttatattgatttattaaagaatgatcagttgattgatgaagatagaaagaaatatattgaaatattggaaagaaattcattgagacttaaaaatcttattgatgatttatttgaagtgagtaaggttaatagtgggaatgttcatttagatcttgttgatgtagatattgtttctttaattaagcaagctcaattagagagtcaagataagttagatgaaaagaatttagatgtaagaatgaattgtagtgaagaaaagattatttgttatttggatagttctaaaacatatcgtatttttgaaaatctgtttattaatattagtaagtatgctttagctaatacaagagtatatattgatttaatacaaatagatcatcaaattcagattacttttaagaatatttctgaagcagaaatgacttttaatgaaaatgaaattgttgaaagatttgttcaaggtgataaatctagaaatacaagtggttctggattaggtttagcaattgttaaaagctttaccgaattacaaaaaggacaatttaaagttgaagttgatggtgatttatttaaatctattttaacctttaacattaaagagacttcatagcgaagtctctttttttataatgcatcaaattgacgtacaccccatgtacaaatgagataatataatgcgatatctaaaagtaaagttacggcaataacgatatacatataagtgtatatagacatgatatcaaccagtaatataccataaagcattgcaatagcgactgctaatcccattgatacaaacattgtaataacaactggcatactttgttttacacatacagtttcattaacccaatcaaatttaggtttccataagttaagtaataaaccaataaagtctattaataatgtaaagataattggagcaagaagaataaataaactatcaaatattgatgtttgaaaaataacaatcaagacaattgataataaaattcctgctggtatacataaaacaccatgtaatgctaatttaatatccaaaatatctttagatgatacaggtaatgatttaataatccaaaagcgatctccttctaatgaaatagatgaagcactaatcatattaagtgatgaagcagaaataacaactaaacataaaatcggagtcatcatctcttttaattcagggacttctttaagtatcatttttaagctatccgcatagaaaacaacaccaacacatgccaagatacataatatcgttcccatagcgccatttaaaaccaccattgcattagaagtaaaatgtttcacttctcttactaataatgcttttttaacagaattggctttcattggtttagcaacatattgaacttttttaacctttgcttttgttgttgccatcttgataaagtttgttgaaagaatatagatgacgattgcaaatggaatgattgcacaagctaaataaataaggaaacttataatattaccactttctaaagcaatacttaaatgataaagtgggaaaattcccttttcaattgctgaagcgatactttgtccatgcataattaaccaattaatatattcttctattgaattaacagcatagaaataaacaaacataaagaccataaatagtacaatcgcaatgacattcttcattttaactcttaccataacatgtgctaataaccagctaaacaagcaagataaagctaaaacgaataaaggtaaagttaaaaagacaccaataaacatgaaaatctcaacaattcccattccaacacgagttatataaatataaaaggctggtgctgcaacaagaatttcatagacataatttaaaatcaaaatagtaaaaacacgacttaataatatatcacgattagaaattggcattgctaataagagttcattatcttttgcttcatatatttcatgatgtgttaaaaagatactaccaataaagcaaagcataataatgataatactcattacagaaaaatacatccaatctattcccattaaatgcagtggttcaattaatgtagaaaagagtaatccaaacatgccaataaagaccacagcaacatatgcaaagagaaaaatcattaaaataattttaccaatactactcttgctattcttactgctttttgtttgtcttaataagattccttgtaatcttattttaatcaatgtcttaagcattgtcattctccaattctaagaatacatcctcaagtgattcattttgagtcacatcttgagtacgaccactgataataagttttccttgtttaataatcgcaatcctatcacacaacttctcagcaacttctaagacatgtgtagaaaagaagatggccccaccttgttgacaatgttctttcattaattgttttaataaatgtgaagctttagggtccaatccaacaaaaggttcatccataataataagtttaggattatgaataaatgctgaaataactgctagcttttgtttcattccatgagaataagcactaattggttgagctaaatcatctgttaattcaagcatatcagcaaattttgctatacgtgcttctctatcattctttgagacctgataaacatcagccacaaaatttaagtactggattcctgttaaatactcatataaatctggattatctggaatataagccatttcttttttacattccaaaggattctttttaattgattttccatcaataaaaatatctccttcatcaaacggtaaaattccaaccacagattttaatgttgttgttttaccagcaccattatgaccaataaatccataaatcaaaccatcatcaatttctaatgacaaatcatctacagctttatattgatcatacttctttgttaaatgttcaatctttaacataatatccctcttttcctataaataattattaaaattatttatattataattatatattttaattttttataaatcaatgtttttcgtatctatctttctaaaaacaaaatacgaatatccataacataaaatcacatcaccaatcaacaacaccataatcacaatatattcatatggtaaatccaagaaagcataaataagaataatcagtccaacaacaatatatgaatacccacctaatttatgtgttttcttccatacatattcattagctaatgtccatggggttttaattcctaaaaaataattttgtggaacttttggcatataatttcccattccaatcaacaacaaacctaaaacactcagtaaaataactttaatatttccctgtggattcaatgttaaataatagaaaatgacaaccaatacaataaagaaacaagtcaaaccatatctaaagatttcatatgtcttttctcttttttcaatatttcttttccttggatcaatcttctttgcaaaaaacattccataatgcacaagaataggaaataatgctaaaataattaaataataacgactcccatatccatctaccttccaatttatatcccagtgaataggaactgtttcaggcatcaaaaaaacactaccaataaaaaacaacgtgattatccaaagaacaatatcaaacatcttctttttcatttcttatcccccatatccataaaattcataaaccatttcatcatatcttgaaagaccgtcatatcaatactataaacaatattttgtccttgtctttcatcaataatcaacccactattctttaaaatagataaatgatgtgaaatagatggttttgttatttgaaaataatctgcaatctccccagcatttaaaggtttttcttgtaaaagctctaaaatctttcgtcttgttggatcacttaacgctttaaatgcatcacccatattttgacctcctctattatttagatatttgtctaaatatctaaataaatcatatcacttagactaatgaaagtaaagaaaaagcataaaagatacctcttatgcataaaataagcctataaagaaaaataggaccactatgaagtggtcctgtattttatgttgctatatattattcagcaactttttgttctttgataacttttgcaattgaagcgattacgtctttttcgtcttcaccttcagcaataatttcaactgtagctttagtaggtacacctaaagacataacacccataatagattttaagttaacttctttaccgttgtaacttaatttaatattactagtgaacttactagcttggtttactaagatagttgcaggtctagcatgtaatccaactggatctgaaactacgaaagataatttttctgccattttattgactcctccttaataatttatagtactattataacacaattaatttacatttccatatattttgaaaagattttatgcgctttcataatatttttttgtcaagtgattttataaatatttttatgacactttttgtgcaataaccaagaatttatgtgttgtcatttcaaaataatgatggtccttaattgcctttaaagcctttaaatagaaaacttgatatttattaatattagctaaatcaggtgactctcttttaaagaattgatgtaaagattcaatactatggaaacgtaatgttccataatcttcaaacttattaataatacgcattccaattccttctaaagttccagcacaagaataagcatcccaagaccctttcatacgaaatggcatatataaagatacaaattccttaagatttgcagtaccattttgttgaacaatgaagtatccatttggttttaagactctttgtacttcagctttatcataatttgaataacgacacataaagacgtcaattttttcatctttaaatggtaactgccctgctggtgttaaagtagtgattttcattgatgtatcggcaaacttttgttcaagaactttctcatcagcataaggttcaattaagaatgttgcttctggttgtggggtaaagttcttagcaaattcaccattatcaacacttaaaaaagctaaatgatcttctggtaaaagatattgttttaaaatagcttcatcatcatattgtggtgttgattgttctggttcttcagcttctccagaaattgtttgagctatctgtaaaagctcattttttaataatttagcatcttctatttccttgcgacatctttttttgctataaacaagaattagatattgaacaattgcatcggctacaactcccatcgcaagaaataaaataaagtagataaaccaagaagctgtaaacatatcttctggtgaagatatcaaataacaaataaaacaaataaataacatataacctacacgattataactaaacgatttatctaatgataaataccaattgacattctctgcttttgccatcttacttctcgttatttcaaaaaataccaattgcatcaaaaataacattcctataaatgttgctaataaaataaataaatattccataatgtctccttacttaattacttcaccatcaattctataatagtcatgacctacctcaaaatatccctttgaatttaaagtcacttgcccttctttagaaaagatttctttcatttcatcatcaatatcataaacataagatcttccatttttacctaaaatcaaataattatgatcatcataacttacaataggtttttctggtaaatcaatatactcaacaggtaaaatcttttctcctgttgaatctatgatcccaaaagttccactttcattatagactgcataatatgaactgcctatgtacttaatttggtaataataagattttgtcaaaacatcgcccttatcattaatcaaagaataacctttatcatttattttaaccactgcacacttatcagagttaaatggttctgcttccatatatgttttatcaataacctttttactattgaaattataatattgatatcctttatttcttacataaacagggaaaatttctgaataaactagtttagcttcaggatataattgacaattttccaattctcctgttagtttccctttgttgtaaacttgatgaggaccataaatatcagaagaacgatttacataagtcactgattttaaataataactatttaataaaactggtaccccaccaattggataagcatacattttatgttgacttgttaagataatattttgttcttcatcaaaataagcatcattgattccaattgtattttggaaaacttgttgacgattgaaatcaacataaatcatactctttaacttttcatcatttaaaataattccatcttgattttgagctaatattttataagttcctttttgttttaaatctacatctatatctttttgatcttcttttgttgtaaaatgataaaaatgatttgtctcattaaaaccaatcacaactgaagaactatatttataacgactgacatatttaacagcctcttttccacgatataattcttctccttcatgatacaaaacaatatactcattatctttaaagataacaggtaattcactctttaaaatagccgtttgactatcagcttgatataatacctttccttcaccatttaaaacatataaattacttttaagataaggatcaacagttgtttttttcgtatctttatcctcttttttgacttctactttcttagttgcataaaacatttggtcaacagcttctaatgtctcatagacacctgcttcgatgattggttcaccctcaaatgaaataacactctttttatcatctctatcagtaactaaatatccaacacctttaacttcttgaaatgttttataattataatttgtaagttgttttcctttttgattatataaagcatagaattgatcatctcgtgttaacataaaagttgtgtctttatttttgtgtgaacaacctgttaataagacaatagctaataatcctactagtagttttttcatacatgccctcctttatatcgacattagtataccacaaatcattgtatttagcattgttttttcaatgaataagactataatatgggtagaggtgattaagaatgaatgaaacattagaaacaatatataaacgtaaaagttgtcgtgattatttaccagatccacttgatgaagaaactttaaaagctatcttggaagcaggtattcaagctcctagtgcgatgaacagacaacaatgtgaggcttttgctgtcacaaataaagagctaattgatgaattagtccatgaattaaatgttgtctttgccgaaagaggcgaaaagaaacctgagaattatcattgtgcctatcatgcgcctgtgctagtgattgtaagtggtccagagtatgaaagccgtcggattgaagatggaagttgtttgcttgaaaacatttttcttgcagcaacaagtttaaatgttggtagctgctggattaatcaattaagagatacacaaaatgttgaagaagtgagaaacgttttaacgaagataggattacctgtcaatcatcaagttgttggatgtgcggcattaggctacgttagaaatgaaggtccacgtaaagagaaaaaactcaatagatatcatattataaaataaaaggctgtgattaaaatcacagcttttttacactttcgcctttgattaattgatagccaattaattgtgtttgcgcaactggttctttatgaatcaattgaatcattgtttttccggccatttgtccagccaattcattatcataacgaattgtacataaacttggtgtaacaagggatgacacttcatatcctccaaaaccaatcaatgaaatatcatctggaatctttaatcctctttccataatttctttataacatgctaatgcaatattatcagtagcacaaataattaaacttggttgatgatttgttaaatactcatgaataatacgacgagaatcagtaaaagagaagtttgtttctttcactgttacatgttttacttgatgatctttcaatgcatctaaaacaccctttttcctttggacaccaacagcttcatctttttgattaacacctaaatataaaacattttgatgattcatacttgctccatattctccaacatcataacctgcatgataatcatcataaatgattgaaataccccctttaaacaattgtgcaactgttaatataggaatatctaatttagcagcaatctgttgatgtgtcatagtgagagttgtcgcaagtaaaataataccatctacattcatacgccacaaatgttctataaaggcaagttctcttatttcattatgatttgtattcatgataattgttgtatacccactattttttaaatactcatcaattgccattaacattcttgatgaagtaattgaatctaaacaaggtgcaacaattcctatcatatgactatgctttgctttcaaactttgtgccacagcatttggctcataatgatactcatctataattttctttaatttttctcttgtttcatctttgacataaccaccattaaaataccttgaaacagtactttttccaactccagccattttggctatatcactcattgttaatttcttattttccatatttctatcctcatgtattcattatacaagaaaacttttcccttgcaagtgataaaacaaaagaaaccatcattacgatagcttctttttgtgggtatatttgttttaagtaatattaagaattaatcgatgaatagtggttctttatttcccacaacatcaccagtttttgttgttgcaacataataaattgaacgatcttctggtttatagtaaacctctaatgtatcaatagttgtcattttaacaccttttgatttaacatcctctttgactaatttttcaatatcagtcgcttcaacgtttttattattaaattgtacttgtaattttagtttcactatctgtcctccttaatcatattataaatgaaagcgattactttttcaagatattacccccatttattactgataatataccacctttttattcaaaacacaaactttattccatattttgttattttcctatacaattatgtgatatttttaggttataacgttatatttccaataactttgtcattttttaggatattttatcaacactttttattgaaatggatagccatttggctatccattcatctttttcgtataagcttttcttctttcattttctgttaataaacgttttcttaaacgaatattgacaggtgtaacttctactaattcatcatcattaatataatctaagcatgattctaagttaaagaaacgaggtttctttaatacaactgtagaatcttttgtagatgaacgtgtatttgttaattgtttaccttttgtaacattaacaactaagtcattatcacgactatgttcaccaacaatcattccttcataaacatcaacaccaggaccaacaaacataactccacgatcttctacactacctaaagcatatgcagttgtttgtcctgaatcaatagatactaagacacctaattgtctttcaccaacagtatcaccttccattggacgataatctaaataagaatggttaataattccatatccttttgtcattgttaagaagtttgtcatgaaaccaattaatccacgtgatggaataatataatgaacttttgtcattccattatcagattccatattttctaatgtaccacgtctaaatcctaatgattcaataacactaccaatacattcatcaggtgcttcaataaagacttcttcatatggttcacattttaccccatcaatttctttaataataacttttggtttagaaacttgtaattcaaaaccttctctacgcatattttcaattaaaatagataaatgtaattccccacgacctgaaacaatccattcttcactatttggaattctttcaatttttaaagaaacatctttatttgtttctttaaataatctttcttctactttacttgcagttacaaatttaccttcttttcctgcaaaaggtgaagtgtttgttccaaacaccatttgaattgttggttcatcaatccgtaataatggtaaaggttcttcttgtccaattgtacaaacagtttctccaactccaatatcagaaagaccagcaatcgcaacaatatctccagctcctgcttcttcaatttcaattctatgcaatcctaagaatccaaataatttttgaattctaaattgtgtttttgttccatcagcacgtaagcatacaacagattcattaactctaatctttcctctttgtacacgtccaactccaatacgtccaacataatcattataatctaataaagctggttggaattgtaatccaccttcttcatcaactaatggtgctggaatttctttaataatcatatcaaataaacaatccatattattaacttgtgttgataaatcaggatctaagcttgaagttcccattaatgctgaaacaaaaactgttgggaaatctaattgattatcatcagctcctaattccataaataattctagaatttcatccataacttcattaatacgaacaactggtctatcaactttattaataacaacaataggtttaacctttgcttctaatgctttctttaaaacaaaacgagtttgaggcattgttccttcataagcatcaacaacaagtaaaacaccatctaccatgttcatgatacgttctacttctccaccaaagtctgcatggcctggtgtatccataatattaattctataatctttataattaattgctgtatttttagctaagatagtaattcctctttctctttcaatggcatttgaatccattgctctatcagcaatctgttcattatcttttaatgttccagataattttaataattggtcaaccaatgttgtttttccatggtcaacgtgtgcaataatagctatatttctaatgttattcatcaatttcgcactccttttcgacttttagattataacacaattataccaaaacacaacaataaatatatcgctgtaatcaacgttttattattatttataaatttatttaaaatctctttcataacattttatcgtgagcggttacaaatcttcttagttattctccacacttaaaagagcatagattttttcaaaggcttgacataattgaaaaataagatcacttacattacttgatggtttaatttgtagaaaatattcctcattttctttcttatctaccatctgtcctatataaatataagaaatatcctgctttcttaaataatctataacctcaatataatgttcaaaaatatttgcaagcaattctaaatttgttttgtataaagaaacataaataacaatatcctcttgtgaaacacaaaactcttgtaaaacatcaatcggtctactatttttaaatttcataacaaattctataccaatattaaaaaagatttgtttatatatcaataaaggtgtcatagaattttcatctccaataacaacaattctctttttattctttaaaaccggttttaaatgaataacttcttctaattccacattattcttataaggatgaacttttgacatttcaaaaaacaactgatattgaacatcagtaaaattacgatatcctaaagttttacaaaatcttgataaagtcgatttggaaactggaatttccatgagaacctcattcattttataattcacaatattcttccaattattcaataaataagtactaatcaaatattcattgctatcatgatcactaattgttagtaaagtatttaattgctcaacaatcataataatccctcgcatatgtatagacaatttcttgtaaataataatctaaaatcatattttctaaaacttcatcaagtcccattggtatttgtaaaaacatcccattttcttttatataatctttatttccaatcattaatgctttgggatgacgagccattatatgttccattaaatcatcattaagatctacaatccttccactcattgtcataataataacaaaatcatcttcattaggaacaaaaaatctttctaaataaatagaatctttaattgtcatttttttcattacacaaaaatcaccttgaaatcttaatgcattagaaatcatttcatcagaaccaattaatacaattctttttgattttaaaattgtttcacaacattgttgaataataaaagctgatgcattcacaactgtttgatagtcatttgaatttaaaaatgaataaagtgttgattcaacttgtttataatctttcaatttaatacgatattgcatttgactcaatctaatcacaacatgactagcaattaattgtttaaaaataacaaactttttaaacccaaaaagtttaaaaaaacgattaaaagtagaaacagatacataacattcatcagctaaatcttgaacactcattttatctaattcatggcaatgtgaaattaaacaataagctatattataatttgtatcacgttcatctggattattaacaaattgcaaaagtgttgttataaagttattcataatattgtcctctactatccctttaatatgtatacattatatacattttcacatatttatttcaagatatatttattttgacagcattcgacaatatgcttgttttctttactaaaaaacttaggatttttctcctaagttttctatattaattttctttactttttcttttaactgctatgaatccacccatagctacaacaagtaataaaccatacatagcaattgaattgttatcgcttgtttctacttttccaggtttcacattatcagttggtttttgattgttttcagcttttttatcttgaacataagttgctgcccagttcatgatatgttgacctttggcatcttttggattgttgtttaatgtatagatccatgaccagtgatcactatattttactactgtttctactccgtcttgatcataatcttcagcaaattctaattttccgactggtctttctacaccaaatgaatctgctttgttttcttgatcgactgtcttatataatgataatttatattttccatccgttgtttcttgagttgtgaaatctgaatttaatttttgtgctacttttgttgttgttaatttttgtccttctgtaagaatcttgaacatacgttgtgaacatgcttctgattctacacttccatctgtttctccttgaactagccagatagctgtctttgagtctctgattcctgcaagttctttatctgttggtgtttctccacctcttaatcttgcaacatccaatgctggacagttaatcattgctgcttggaataaatttggatatgcaattaacattcttgttgtcatgtaccctcctgctgagcatcctgatacgacaactttttctggatcgatgttatatgctttcataacatccttgatttcattgtaagctttctctaataacttatcactttgtgcataataccatgtttctggtgcttggaatgccatgacatttgcgccaccaaagatttcttgtgcttcatcacttgcccatgcaacagttcctcggttggctaacatttgtgcaacgttattaccagtaccatttaaatctccttcaccatttccatggaaccaaacgattaacttatcagaaccttttgcttcatagaattgatagttgataccatctttgactttaactgatttgaatttttctgtttctgcatccttgacactgttatcacaagtatatgtagcattgatatctgttaaatctctaccatcaacagctgttgctttgattggtttgttttgagtgattgtatactcaagtttagctggatagtttctaccttcacttaaccaagtcaatgtagctccttcagattcatcgaagtaaacagtcacttgatttccttttgtttctaccttaacaattttacgatctaaatcgtaataagcatttcctttgttttctccaatttgaacaattgattttgcatgaactgtgaatgtatccttatcaacacctgatacacgtttgtctgatccaaaatcaataaccattttattaacgacttgacctgcatctgtaattctagcatgtaattgggctttataagtttcttcatttccttgaacataagttgctgcccaattcatgatatgttgacctttggcatcttttggattgttgtttaatgtataaatccatgaccagtgatcactatattttactactgtttctactccgtcttgatcataatcttcagcaaattctaaactaccagttggtctttctacaccaaatgaatctgcatcgttttttaaatcaactgtcttatataatgataatttatattttccatctgctgtttcttgagttgtgaaatctgaatttaatttttgtgctacttttgttgttgttaatttttgtccttctgtaagaatcttgaacatacgttgtgaacatgcttctgattctacacttccatctgtttctccttgaactagccagatagctgtctttgagtctctgattcctgcaagttctttatctgttggtgtttctccacctcttaatcttgcgacatccaatgctggacagttaatcattgctgcttggaataaatttggatatgcaattagcattcttgttgtcatgtaccctcctgctgagcatcctgatacgacaactttttctggatcgatgttatatgctttcataacatccttgatttcattgtaagctttctctaataacttatcgctttgtgcataataccatgtttctggtgcttggaatgccatgacatttgcaccaccaaagatttcttgtgcttcatcgcttgcccatgcaacagttcctcggttggctaacatttgtgcaacgttattaccagtaccgtttaaatctccttcaccatttccatggaaccaaacgattaacttatcagaatcttttgcttcatagaattgatagttgataccatctttgactttaactgatttgaacttttctgtttctgcatccttgacattgttatcacaagtgtatgtagcattgatatcagctaaatctctaccatcaacagctgttgctttgattggtttgttttgagtgattgtatactcaagtttagctggatagtttctaccttcacttaaccaagtcaatgtagctccttcagattcatcaaagtaaacagtcacttgacttccttttatttctaccttaacaattttacgatctaaatcgtaataagaattacctttgttttctccaatttgaacaattgattttgcatgaactgtgaatgtatccttatcaacacctgatacacgtttgtctgatccaaaatcaataaccattttattaacgacttgacctgcatctgtaattctagcgtataattgggctttatagctattatcagctttaacaggaacacttaaaaatgttgttaatgcaattgctgtactaacaaccaatgcaaataatttcttcaatcttttcatgacctttctcctcctgataaaagtatatcagtttttacagatattgattattccataattgatatctcgtttctcatttagatatataacttaaatttctataaaaagtgtcacaaaatgattctttttccaaccataagggtatatctattaaaaaaacagatactattttgtatctgtcaaaaaatgataagataaatctataacttcttgaatatgttctaacttatcaaaattatgagtagctccttgaataggataaaaagctgcttgatgaaaaccttttaaatacttttttgatatttcaaaaggcaccgttgtatcatttgtaccatgaataatcattaattgattttgataagtatctaaattctgataaaaatctcttgccgttatatcctccacaaactcatgagatatttcaaatccattatgatcataaaaatcagcttctacaacattcccttttaaatactctacagcttgtggcagattaaatgcaggtgcccacaaacacatcttagaaatatcttgaggataaagttttgccaattcactagcaattgctccacccattgaatgacctaataaataaatatcagtaacagcatctaatgctttcacttcatttaaaatcattttggcacatgttagctcatcttggaaagtcatatctttaaaactcaaatcagattctccgcttcctagaaaatccattcttagacttgcaactgagtgtttttccaacattctggatatagttgtataagaaaactttgttcctgtattacagccagtaaaaccatgaaaaataatgcatattggatatttaggtacattaggaatatgaataaatcctctcattattcctttagatgtgggtatttcataatatttttgcataataactcctttaagaaaaagatatggattgcatcatacaatcatctaaatattctccatttttatcaaatggactaaaattaaccgtgatactatcaataattttaaaaatatattgttcattattgattgggatatcatcaataacatgatgactagaacgtaatagatcaattttttgtaatgtattatctacaaaaataaattgaagcaaatctttatctgcatgaatacttatacattcattttcactattatttatagaagtttcataataatcttcaaatctagacgtatttcttatttgtttaaaaatatataaaaacttatcattttcatattttccaacaaccatacaataactatgattcttgcattcaagtttatcccatgcaacaattgttattttatttgatgaagtctttttgatatcggcaattgtatctaaaacttgttgttgtgtatcaaaaacatatccagtctgttgcttcatatataaaccaacacctaaaataaataatgcagctaatagatatattattatttttaaatttttcttcataattattgagtcgtgtaattatatacaatattaattaattctgtattcaaatcaacatgatcgccaaatgaatcgtaagcttctatttgaacattctgattttctcccaaatattcaataataaatttttgatttgacacgacctctcctcctatttcataattacctgctgttatatcaatactattaatcatcccaaacacattaggaatacaaacaatgttatccattggtgataatgaaatcacatatgcattttctgaactatcaggaaaagatacataatgaaaatcactctcatatttacctttactattttgttcaaaagtaaatagcttatatgtatttttataaaaagtaattataaaatataacgacttatcactatcaattgcagcagaatatgaaatttcttcatcatccacattaacatgaaaaacttcttgaattgctttctttatattttcatcagtatctaaggtatatcctgattcaattttcatataaacacctgtaccaatcaatccaattgctattaccaacgcaataacaacttttatccattttcccatctcaaacaccccttacaattgtttttttacttcatcacttaaagctttataaccatcatcattgatatgtaatccatcgatataatatttttccaatggttgtccattttcacataatgcttgataaactgatataaaatgaacatattcataaggaataacacgttgatactcctgttcaatcatctttaatatatcattactacggattccttgttttaatacttgataaccatgaacattttctaagcatggtatacaacctaccaaatgaatttgacattctggtaaattataatgaataatctctaccatttcttttacatttaatgctatatctcttggacttgacataactgtatttcctaagtcatttgttccaatcattaaaaagacttgacttggctgatatttgataaccccttcatcaatgaaatgcaataacatatctgatgtaattccaccaatcccacagttatgggtattctcaaactcaccaaaccattttttaagatgacaatattcagtaatagaatctccataaaaaacaattccatgaggttcaatatatttatgtccagcaataatttgtaacattcttttaagaattgactctcttaattgatactgatttgtatcatatttcatattttctctcacaagcttcactccttatgtttctattataacaaaaaagtgtcctaaagacacttaaataaataaaacctgaacacataacatataaacaattgttccaccaaaaatagataacaaagtatttcttttccacaaatgtaaaccaataacagctaaaacccctaatatctcacaaataccatgattgccacttaataaatcaacaccctttaaacaataaacaacaagcattgccataattgcaaaaggtaaaacatttcctaaatattcaataataggatgagtatgatttttaaataaaagaaatggtaataaacgtgttaataaagtaacaaaagcaatcactgcaattaataataaatcatgcattttcttttccccctttttgataaaggataattaaactcaataatatccctatcattgaaggaataataaaagattcactaccaaaaataactaaacataaaatacttatgataaaaccaatatatgtataaagatgtttttcatttgttaaaaactgttctaaaacaataacaacaaacaaagccgtcatagcaaaatctaatccagttgtattgattgtaatcaacgaaccaatcaatgaaccaactaaacttccaacaacccaataacattgatcaaagaaagaaattaaaaataaataaatcttttcatgacaaccctccggtgtttgagaggcaaccaatagtgagtaagtctcatctgttaaagaaaaaatcatataaggttttaatttccccattccttcaaacttcttaatcattgatagaccataaaccaaatgtctcgcattaataagtaatgtcataatcgctccactaataagtgttgctccggaagttaataagttaatcgcaacaaattgcatacttccagcatatataaaacaactcattaacaaagcataaatcacaccatatcctttactctccaataacattccaaacgccattcctaaaacaatatatcccatcattactggaatagttgtcaaaaaagcttctcgcatatcctttttatacattctctataacttcctttaattcctttaaattctttgcaatatattcacaatcattattttcaaattcttctttacttccataaccatataaaacaccaacacattgtattcgattcaaatgtgctccaatcacatcatgtttacgatctcctaccattaaacaatcatcaacattaagtcgctcttgttgtaaacaataagctatgacatcttttttattctttctcgtaccatccaactcagccccatatattcctttaaaatacttcgtcaaaccaaaatgttcaattatttttttagcaaaaatataaggcttacttgtacaaatatataaatcttttccactatcaataagagattttaaaaaatcttccattccttcataaacttcattttcaaacaaacctatctgagaataatattcacgatatttttctactgcctgccaacttttttcttcattcattccataatacttttgaaatgattcatctaatggcggaccaataaaaactgttaattcatctaaaccattaattctaatatcaaatgaatttaaactataagcaacagctttcgtaattcctaaaaaaggatcagttattgttccatctaaatcaaataatatatttttcataagctcacctctttttttaattcattatagcataattttatataataatataacttcgtacaaaaaaagaatcgaaacatttcgactcttttttagaatacatatttttaagggagattttatgaattctattattctttacacttttaatataccgtgtcaatatgaaccatgtatgaacattatttgtaattgttgtgaacttataatgaaatatcaatccctttttggtgaagattgtctaaacattctttaagataagcttcgttatgttctggatatataggtgaagatacttggatatcttgacagaaagtcattttagaaacttcgtatcctagctgtatccctctataacaaggatctttccacaatggattaacctgataacctcttttttccatctcttgaataactaacaaatgaaattgatataaatattgataaggatgggtataaacataatcaacagtttgatgttttcttttccatccctttcctcgcattgcacatatttctcgatgttgtcctaataattgttgatatggtaaatatgcaattaaatcttgatgccaaaggcgcataaacattccccctcttttttcttattctatacgttttttcttaaaaaaatacgcgaaaaagaaaaaagtcctcaaggactttaaaaaaagtgaaagagatgctttggggaaacatctctttcttagggatatatgatagatttgaggggaatcaatactatcgtatttgtctttcgacatctaataatataacctagaaatatgtcttttttgtgaacttttaaaatttatgtggtttatttaaaatttcatgacaatgacgacaccttggctcatagtgttcaacagctccaactaaaacaattggatcttcaaaagatgctggtttaccatctacaagtctttgtgtacgggttgcaggagcaccacattttgcacaaacagcagttaattttgtaacaaattcagcacgtgttaaaagttcaggtaaaaccccaaatggttcacctctaaagtctttatccaaccccgctaccatgacacgcaatccacgatcagctaaatattcacaaacatcaacaatatcatgatcaaagaattgtacttcatccactgccacaacatctgtatctggtttaacatattttaaaatttctttagaatcattaaccacaatacaaggaactcttgttccagcatgtgaaacaatttctgtttccgaataacgattatcaatttttggtttaaaaacaataatattctttttagcaaaggataatacattaatacgtctgatgagttcttctgtctttcccgcaaacatacacccacatatgacttcaagccatccttcacgatattgattatacatatgatatcaacctccacgatatcttattatactataaaagaaatcataattgtacatatttcattcataattcatctctataatgaattcaggtgataaaaatgaaatggttgagaaattttatgtatggtagatatggtgttgaccagttagggaattttttatttattctctatattattttagcggtggtttcttttgtatatcctccagttatatttatttgttatccaattattatttatacattgtttagaatgttctctaaacaatattataaacgtcgtgcagaaaatgattggtatttacaaaaaacagcaggaataagaaaattctttaaacgtcaacaaaataaatggaagtatagaaaaacgcataagtatttaaaatgcccacactgtcatcaataccttagagttcctagaggtaaaggtgaaattacagtaacttgtccatcatgccatcaacaatttgatcaaagaacttaaaaaagactgtagtgaaataacttttagaagttattttactatagtcttttcattatgttcttaaatcttttgttggttctaatggattgacttgctgatcacttcttgcaggattagcaaatttactatactgtttcaagaaaacaagacgaatatcagctaatgccccattacgatgcttagcaacaataatatctgtagcaccttgagtttctgcttcttttttaggatcttgataatcttcacgatgaataaatgaaacaatatcagcatcttgttcaatcgccccagattctcttaagtcagataaaactggtcgtttattatcacgcttttctactgaacgtgataactgacttaaagcaataactggaacttctaactctctggcaatcatctttaattgacgtgagatatcagaaacttcctgttgacgtgattcacgactatttgctggtcctgaaattaattgtaagtagtcaataatgatcattttcaagccttgttcacgttttaaacgacgacacttagcagctatttcaccaactctaattcctggtgtatcatctatataaagattacatttagaaactttatcagccgcagcatagtatctctcgttattttctttcaaaatacttcctgaacgcaaagattcagcatttaaacttccagccgaacaaataatacgttgaattaattgttcagcaggcatttctaatgaaaatacagcgactgcttcatctgatttataagcaacattataagccacatttaaggcaaaagctgtttttccaacagaaggtcttgctgctaaaataatcaaatcacctttttgaaaacctgatgttaatcgatctagatcataatatcccgtcttaacaccagaaatttttccatcagccttttgtaacataaccaagcgatctgttactttttgaataactgatttaacatcttgaaattcaccagcattacgatctcttgttacatttaaaaaattcttctctgcttcaccaataaaatcattaatatttccaatatcaccataagcatgttcaataatctcagttgactcttgaatcaatcttcttaataatgatttttcatttaatatctttaaataatactcactatgagcagttgttggaacagattcacttaattgtaataaatactcaaccccaccaattttatccaataacttcttatcaattaaataagatgttactgttgtgacatcaacaggattattttgactatcaatagattgcatagcctcaaaaagaatgcgatggctatccaaatagaaatcatcttttgttgctaggcttaatatattttgacaagcgtcacttgatatcagcatagaacctaataaagatctttctgcttctatatcatggggatattctctggccatcttgctcactccttatttttcttgtaaatgcactttaattgttgcaataacatccttatacaattcaatttctaatcttgtatatcctaatgcttgaattggtctagcgttaataaattttcttttatcaatcttaatatcatgttttttcaataattcttcagcaatattctttgttgaaacactaccaaaagtctttccatctttacctgaagataaataaaactccaatgtaattccttctaaaacagcttttaattcttcagctttctttttattttctaaatcttgtaaacgttcttgttccttattttgagcaacaatttccttaccatgtgcagttgctaaaacagccaacttatttttaattaaaaagttttgcccataaccatcagcaacattcacaatttcgcctttctttcctactttcttcacatcttgagttaaaataactttcattatacttcacctctatcatctaaatattctttaattttttcttctaataaaactcttacttcttcaatactttgattttcaaattgtgcagcagccatactaaaatgaccaccaccacccatattctccataataatttggacattaatatccttagcacttcttgcacttaacgctaccattgtcttagaaacacgaccaatggtaaaagaagccttaatgctacttacttcaagcatagaattacttgctttagctaacatcgtacgtgaatattcttgattttcttgaccacaagctatcaatatatagtcattatattgatatgcttcttgagtaattgataatttctttaaagtatcttcataagaatcttctaagaattcataagcttgagttacattagcttgtaattcttttaactgcgcagctgactggaatgtacgaacgcctactctttgtttaaagttgttcgtatcaaccaacatacctgcatacataatagtagcatctaattcattaatattcaaatccacattttggtaatcacacaattcaacaaccagttcaacagtacttgaagctgctggctctaaataagttaaaactggtgcttcaataaattcttcaccacgacgatgatgatcaataatcactttatttctaacacgctctaacaaagcacttgaaatagctaaacttggtttatgattatccacaataatcaataaagtattcttgttgatacgctccattgcttccgtataagtcactatcaaacctttataacgttcatctgatttaacaatcgtcacaacatctttggtttttttctcaattgaatctaaatctacaacaatatttgttttcttcccataagccttagcaatcttagcaacacctaaagacgctccaaatgaatccaaatccgaatttttatgtcccataatcagaacttgactcgaattttttatcaatccagctaacgattgcgcaataactctggcacgaactttactactcttttcaaaagtatcactattcccaccaaagaattttacattatcatcacctgattttacagcaacttgatctcccccacgagaataagttaagttcaaagctgccgatgccatatcatcaagttctcttaatactcttgaatcacggccaattccaatacttaaagtcataacttcatctaattctctagacatctctttaaaagtatctaatattgcaaatttattttctacttgttttttataaattctttcattaaagaaagctaaataaccaccggatttaaaccgtctaataataatcccattagaataagcccaatcaacaataacctgtcttgattttgcttgaatcatcgccatcttcggttcatcagcattttccaaagtttcttcataattgtcaattgtaatataagccatacaaacttgctgatctaaataatcttgttgtaaagataaaaactgtgtgacatcttttagataaataagttttgtttctttactgttataagcttcaaacttcttacctttaatatctacaaccttaatatcctcatcttcaaaaagtgaagccaaatgaggttgccattctaataacttaactccaacaatattaatattcatttctttaaacaaatcacttgtccaaacaacatttcttgtttcatcatattgaatcaaagcaataccaccaaaaatcaaagcattcttagcatcaacatctaatgcatcagcaacactcatattatttgtttccacaagatacgtgagataagccaagacaatgaataggaagatattcttaattaaggcataaactgcaaatgcaaataacattggtccatttaacaaaagatataaaccaaataacaaaacacattctccaattaataatgctagtataatatttctagcttgaagaatctttcttgccattattcatccctcctttaatcattgctatgtctattatacaatatattttctcttaaatcactaaatatatcaacgattccaataaccacataaaaagtattaaccattggaataaataaacccaacaacacaaatatcataaatttagctttttccttcacaatcaacaaccaagataaaaaagccaatccttgtaaagctaaaaccacaacacaaattgtataaagataagttaaataaatactatcaacataaccaaattttactaacccataagaaaccacgagaccaattgataaaatcaatcccacgggtttacttaaatgcatatttgcaatatgaaatgaacctggaaattgaatatttaaacgcattaaaataatctgacacattaaaacaatcacatacatttccatgactgataccattaatagaaaaagtggtgctaaagctataaaaaattctaatgatattctatttgataaagctgatataggttgaatcatggttatatacatatctctcatctcagcaatgagatcaacccctaataatcctgaaaaaacttcataaatcaaaatattattaaggaaagtcactgctaatgttccaaataaaattgtttctttcttagctttacgttttaaagcctcaccaataaataaaccagctaaacatgactcaattgatgaaataacaaagaaaggcaatcccatcatagcaataacaaacattgaaacaacacagacaatgatattatcttttaaagaataagtataaccataccaaacaagaggaacactcatcacataacaaatcaacacatcaaacatacttccagtatatgtattaaacaacgataacgctccaaagattgctgctatcattgctccttgtaccattttctttgtatttgttctacccataatatcgccctttctcaacatataaagtatagcatattatagcacaatttaagaaaattgatactccttattaacataaagaaaaaaaggaatatttctattccttatgagcaccttgttcttgttgataagcttctttatcagccatttttacccatggcatccataagaagtaaggtaatataatattaacaacaatagctaatgctaaaactttccatccaccttctaaaaaggctcctataccaaatggtaacccaaagacaaatgttgtaccattgagatgtggtaccagaccactcgcaattgctagataggcaactgctaacatcaaaaccccattagttaagaaagggacaataaatttaaagtttaagatcaatggcatcccaaagtttaaaggttcaccaatcccaaagattgctggtccaattcccaatttaccaaattctctaaattgtttagatcttgcacgtaataataataaacataaagcaatctgatatccaccaaaacagaagatattgtagaaagcatttccaacaatattaggtcctgctactccagttgaataagctgcaagatttgctgcatctaaagctaaccaaattggattataaaatggtgataaaacattttgaccatgaattccaaagaaccataatacttgagcaaagaaagcaataaataaaactgcccaaatacttcctcctaatgattgcataggaacttgtaataatgtataaacagcttgatgtaaacattcaacacttgtcaaagagaaagcataattcacacccataaataaaaccgcaacaatcacaaaaggaataattccttcaaaaacattagataccattggtggaacaccttcaggcattttaattgttaaatgatgaaccttacaataacgataaatagcaacactcacactagcaacaataatagctgtaaatgccccttgagcccctagccaagttgttggaatcgctgtaacttcatcagcagttgcccctaatggtgttacaatcaaaaaacttaaaaatgcaatggcagcagcagtcattccatcatcattctttaaatattgatttgctaagtttttagcaatgaaaaagaccatataaacagctaataaacccattgtataagtataaacagtattaaagactttagatagacctgaattttgaataagtgtagaaattggtcctaaaggaacaacaactaataataaagcaaatgaaccaacaaccgtaattggtaatgttgccatcattcccccagatagtccttgtaaaaatcgattggttgaaatcttattaatcattggactaatcttttcaaaaaaactctcaaacttttccttcatattttttctcctcaaatataatattagtaaacaccatctagaatctgtctactttagaaacgttctacaagtattataagtgaaaataatacaacttacttgttcatttgagatgtaaaaatataacaaatttgattttttctctcatattcaactcttttttactgattttgacatcaaatatctttgttccttttcataattttctaaaaggactttacgatattgcttaggtgacatactttttatttctttaaacttcttaataaaataactacaactatcaaaaccacattcaacactaatacttaatatagataaatccatatcaaaaagtaattcacaagctttttctatacgataatgattaatatattcaattggtgtataacctgtattttctttaaagtatcttgaaaaatattgatgattataattaacaagttgagctaaagattgactagtaattttttcctgataattcttttctatatattgtaagactttttctacagctaataaattatgtttgttttgttctagaggaattaaataattattttcgataagatcttgaaaaatatataataagttgagtttaatacttaattgagaactgatttgttgatttttgtattcatttaaaatattgaaaaaggtgttttgaatccgtaaatcagaacagataactggattcttaattgttaattttccttcaataaaaggattaatatattgacaagatacataatcagctaaagcaaactctaataaatgacgatcaaatacacatgtcaaataacgacttttttcaatcgcaatcatatagtgaagaatatgcggttctaaagcatacatttccccagcattgatgaaatgtgatattccatctacaaatatattaatttttccttcacagacataaagccactctatttcatcatgccaatgtaaaaaacagacttgctcattaacctcgccactttgatcaaaaaattcaaagggaaacaatctatcaccatgactatgtttttctctgaaacttttcataataaacctccaaatcaaatttgttatatttttctgtataatatatgcaagaatatttatattttttattatattattttattacaaattagcaaaggagaaaataaaaatgataaaaagatatagatatggtcaaccaatatctactgatactattgttaaatcaattcctatttgtgatgaaaacattgcattttttcaatttgaaaacaaggaaaaaatgacttttacttatacaatggatgataatgatattatctatggattaggtgaaaatatgcggggaattaataagcgtggttttacttatatttctagatgtatggatggtgctaaacatactgaagatcgtaatagtttatatgctgcgcataacttctttattattgatggaaaaaaacaattaggggtcttttttgatgctgctggaattgttagttatgatattggagaaactgaaattgatcaattgatcattacttgtgatgataatgattttgatatttatttgattgaaggagataatcttaaagatatagctaaacaatttcgtcaattaattggacaaagttatattccaccaaaatgggcattaggttatcatcaaagtcgttggatgtataaaacagaagatgattttagaaatattgttaagcaatatcaagaaaatcagattccattagatgctatttatttagatattgattatatggaagattatgaaagttttacaattaatcgtgagaatcttcctcattttgaagaacttgttcaagaatttaaaaaacaaggtgttcatatggttccaattattgatgctggaattaaggttaaagaaggatatcaggtttatgatgaaggggttaaacaaaatcgtttttgtaaggataaagatggtaagaactttaaatgtggtgtatggcctggttattgtcattttgttgatgtattgaatgaagataatcgtcattggtttggagatcaatatcaattcttattagataaggggattgatgggatatggaatgatatgaatgagccttctattttttatactgatgaaagattgaatgaagcatatagtttagttgatgaattaagagatagtgaattaaacttatttacttattttaaaatgcgtggtcagttttctaagttatctagtaatccaaaagattatcaattgttttatcatgatattaatggtcaaaaagtaagacatgataaggttcataatctttatggttataacttaacaagagcagctggtgaggcttttgaaagattttcaccagagaaaagaattttattgttttcacgtggttcaatgattggtatgcatagatatagtggaatctggactggtgataatcttgcttggtggtcacatttaaaattatgtattcaacaaatgcctaatattaacttgtgtggttttctttatagtggtggtgatttaggtggctttggtagtgataccaatgaagaattattaatgcgttgggtacaatttggaatctttacgccattaatgagaaaccattcccaaagtcaacgtgcacaagaactttatgcatttaaacatactgaaatatttaaaaatatgattgaaataagatatgcttttattccttatttatatagtgaacttgtgaaagcagcattatctgatgaaagttattttagaccattagcttttgattatgaagatgacaaacaagcaagacttattgaagatcaattaatggttggtgaagctattatgattgctcctatttatgaacaaaatggtcgtggacgatttgtttatcttcctgagaatatgaagttaataagaatgcgttcattaagtgattatgatgaaattgagttagaaaaaggtaatcattatattcatgtaggatttaatgaaatgattttctttattaaaccaaatcatattgttccatttgcaaaaccagctttaacaactcgtgatatgaactttgatgaattatatgtactaggctatgttcaagatgaaattgaatacactttatatgacgatgatggatatacaagagatatcaatcaacctgaacatttccataagatttatgcttcaaaagaatattgtgactgtaaaactaaaaaagtacagtatagataaacctcccaaaaaacatcttgatttacaagatgttttttaccgttttaaacataataccaactgacctaacaaactataatctcttaattgatgattattgataagttcaatagttggcatatattcctctggaatataatgcataacactttctttcaatttcttcatatcagtaactgcacgacaacatacaacaattgtttctggtgcaatgacacaactcatagatgccataactttacttaaatgctcaatgatttcttctggagttctattaacatgaatatctacattttcaatattatgaggtaagaatttcacttccccagcaaaatttttataacctttaatcaattgaccatctataattgttccaactccacaatctaatccttgaggatagaataataaggatacaaagtttccttgtttcattgaataataatatcctgttattgcagtattaacatcattaccaaaaataatcttttgtttgtaatgtgcttttattgctccaatatctaaatcatttaaaccattgataactggtaatcgtatataattttcttgaataattcctggtgatgagaatcctatctttgtaatacttggatataatgctagaattgtatcaatagtattaaagatatcatccattgtcatgatttctttaacaatatcattttccataagtatttcatagtttggagcataaacccgataagcaataacaatattttcttttgtacgtataatcgcaattgatagaattgtttcatgatattctatatctgttttaagtgataatgcttttttcttttgttttgcttttttatttgctagagcatagtctatttgatgaaaaatggctgctacatcatatgttccaaatatttttgctggaattgttaggacaatttgttgttctaacatcttttgtatttgaggaagcatatatgatatttgtggagctaataataccacatcataatcgtcagctacttcatatatttttgtataagctacagcttcagcttcataattaaagttcataatattagaagcttcgttaattttttcagcaaagaacatcgttgttaatccaccactgcaacttaataatattttaatttttggttgattcataagtttttctattgtatcaatgagttcataaaacaaatcaaccgcatgtttaaagttcttcatttgaaaatgaagatataattcaatcttttgagtacttttatgaatcactgttaattccattatatttaaaggatgaaacataacagagcctaacccatattctgtttcaatcataacttgatcatctgcctgactataaatatgacacccttctttttgataattcaaaatccataatttataaacttgacaatatacctctttaaaaaaatcatctaacatttaattcaccatcccttgttatctctatcttaacatgagatgaaagagaataatttttataaagttatttagaaaagacttcttcaaaatctatcaagaatctattaatttaatgaaaaaaatttatcaagaattttaaatttttttgtaataaaagcctttggatgaaattacagaggttttgaatattttaataaatatattatcgttacattatgatttcacaattaatttattaaatttaaacaaattattaatattgtcgattaatatatttacatttttttgaatcatgctaaaatatctcatcgaaagtacttttaaaaatactataagagattgtatatattaaaaaatatttaaaatcatttattatcactttaactgtattcattttagtatttgtttgagtatctaatgtagggttatatcaacaaacgattcgcctaattttgatagttaagttatctgtgtaaatggtccagattatgatatttctattaataatgaggctaataaaacaatatcatcagtaactgataaacacagtattactactgaagatatctttgataaagatacaggtaaattcactattaatggatcaatattgaaaaaccgaagaattaacaattaattttgcaaaggctgataataaagtttaaaaaaagaaatatttatacaattttccataatctaacgtctatagtaatgcattaataactgagttagccataaccgtaattaatgttgtatttctggtaatttatggagtaatgccatcaaaattaccattactgaaatactgcattgattctaaatagacattagaaatgcataaaggaaaatagaagtattagattaatatcttagtaaaatgtgggaattctactattttaaatcaaaatgattctatatatttataaagaggggattttttatgctacgtaactttttaaaacaaagaaattatccatttatattatttttaggaataccagaaaataatttagatttattaacttttatactttttactggttattgcatactgaaatataaattagttttacctatgtggtataatctattaattgctattatattttttataattactttaatttttaaaaaatataatgcaaataaccaatataaatggtcaattaatcattcaaaaagtttgtcaatattttttgtaatttggtttttattagaagtattttaatacttattgttttaatgattgcagattgtattggtgatactattgaaacaacgttcaaaacttataattatctctaatacatcttattaataaacttgaagaaatgcataatactactattttggtatcactatcttcaggaaaaagaaagacccttgagttcatcaagggttttaaatatcaattattcaccaacatatgataacacttattttatttgtgttatttttgttgatatttcatacataaaccacagcatttacacctgttatttctatttaggtgtttttctgatatcaaaaatggtgtcattttcttattgattttcaacttaatctcaactaaattatttttttaaacccagcaagttctatcatacatttgcatgtttgataatgttcacaaaagaaatttcacttaaacttttaacctctattttggtttattataatcataatatgccatcattttcaaataattattgacttcccaatttatttaaaaattaattttacataagctgtaatatcttcatcagttaattcactctcgaagttaatactttgaatcatagcagaatattcaactttattctttaataattcagttaattctttagcataatatcttggcacataacctaaatgatattttttattattcttatgaaagataactttaatagcattttcatcatatttattatcagattctaattctaatgacaatttatcattaatattaataaattgtttacattccttaacatcaggacaatgtcttgttcctgcaacatcaaactcaactttattggtatcaaaagctacgacaaattcataattatctgtaatcaatcttccttttgttgcttttaaaatttctaattttgatgaatcaaattcaagattatatgaatttaaaatttccaaataatccgctcttgcattattaggcaaccttgtatctatatttgcaaataaatctttactcttatattctttagaagtatcttcaaaacctggaaaatatctaaaacctgctaatttagcatcattaagttctggctcaatatatttaaaaacataaccatcactatcataaattaatgagccaatcttatatcttctccttgttgtaggctgcttccaaataagccacatttctttattcattattttctccccccttttttatattcaaaagtatatttcttcttattttcaaatagtttattatgtattctttatgtttttcagttattaattcatcaggtatcttattcacaatattattaattatttcatcagttaacttatttaaatttagtaattctctctgtacaatatcataataattttcatataaatattctatcaattcaaaatgcttgtatttttttcgaatattttctttatatattattgttttgctatttctaatatatgcattaaagtcttttttgccggaataataattctcagcatatgtttcatctttaaaatttcttaaaagattacatccgttatcatataaaggtgaaaatttatagtgattattcactattgtaattccccaattttcttcatgacgatcttgttcacctaccaatgcatcaaaaatcataattttgataaaacctataaataaattttggtcaagttgatctaatgtttttttaatatttgaaattgtataaaacgatgatctttcaccattatctttattcaaataagacacagcatctatatgttctatattctctgcgttactattatcaacaaaaagataattaagaacacctaaaattccttcattatcttttgccaattctattcgtgcacattcataaccaagaactttggcaatttcatagctcattttttctgaacatgcctcacttaccagatatccttttccttcatatttaaagaatgccttgtttccttcagtatcaatgacaagtttttttactcttgatcccttcgcgttagtgttatccatcaaaaatctaaaatcatttactggtgtttttatagaatacttttccactatatcacctactcttttgtaaccttagtatatcacattttatattttatgtaatgactctttttgatttttactccactttcacttttcactccattcattttattattaaagggcaataatcattaagaatctgtaaaatgtcaaataaagaaaaagctcttaaatacgaaataattccatatttaagagctttattttaatgcttaaattttaactatttgaattattcaccaacgtatggtaataatgccatttgtctagcacgtttaatagcagttgctaattgtctttggtatttagcgcttgttccagttacacgtctaggaatgattttaccattagcagatacgaatctttttaataattcaacatctttgtaatcgatgtaatcaatcttattttttgtaaagtagcaaactttctttctacccattctttgtcttttgaatgccataagtcttatcctccttaaaattgtatatcgtcttccatgatatcaaatgaatcaaaagaattatcaaaatctttttctaaatccactgttttcatatcatagaaattatcttgtgcgacttgaggttgttgctgttgtgctttttctctggcagcttttgtttctaaaaactgaacactgtcacaaacaacttccacaacatataccttttgcccttgtgcattgtcataactacgagaacgtagtctaccttcaacaccaactaaagatcctttagaacaatatctttctacattttcagcaactttgttccaaacaacacagttaatataatctgcttgttgaccatctgctgaattatagttacgattaagtgctaaagtaaaacttgttactgcagcacctgtatttgttcttcttaattcagggtctcttgtcattcttccaacgagtacgacacgattaatcatatctacgcaccttcttagtctcttctaagagttaagtgacgtaatacattcgcattaatacgtgataaacgttcgaattcagcaatatttgcaggagtagttgttgtatctacaacgacataatatcctttagtgtaatctttgatttcataagcaaaatcacgtaatccccattcgtttacattatcaacgctaccttcaccatttgataaaatgtttttgaagttttcaattaattgatttctagcatcttcttcaacgtctggttttacaataaacataatttcgtatttgttcatttttttacctcctcctatggtctaatggtctatatctttcatatagacaggcagtaaataaatttacatgcttacagattatagcatatcatttttaaaaatacaatgaatttatcaataaattttatatttttaaatcaaaatatcaacagtcattccatagagattatagcactcttttttcaatcacataataatcatcaaaaatattcaaaatcacataagtaagtggcaaagaaaatctttttcttccacaacttcctggattgatatattgaacattactctctttataacatgcaaattgatgagaatgtccataaatataaaaatcaacatcttgctttttacccaattgatgcaccatataaaaatgataaccaccaatttcaaaatacttctccacaccaagctcaagttgatcattattccctttaacagctataaccggtgcaatttgttgtaaagcctctaatacttctactttcatgatatccccagcatgtaaaatataatcacaagtttttaaatcatcaacaacttccgctcttaagacattatgggtatcagatataattcctattttatatttcataatcatcatcctttccttattatttattcatcttaataaaatattaattaatcattcatctttttctgttataatggatatcaatgaggtgaaactatgaaacgtaagaaaaagaaattaaaaaaaggggttattgtttttttaggtcttttattgttgtgtggtatggtagggtgttattttattgttcaaacccataatgatatagaagaatataatgttgaaggattatcaattcagcatcaatttttaactatcaacccttattcaagaagtggtaaatcactacataaagttaatggaattgtcattcattataccgctaatcctaactccacagcacaaaataatcatgattactttgaaagtcttaaaactaaaaagacagcttctgtctctagtcattttattattggactaaaaggagaaattattcaatgtattccacttaacgaagtttcctatgcctctaacaatcgtaatcgagatacaatttctattgaatgttgccataaagatgaaagtggaaaatttaatcaagcgacttatcaatctttacaaaaattagttaaagctttaatacaaacctatcatttagataaagatgatgtgattagacattatgatgttacaggaaaaatctgtcctaaatattttgttgatcatcctgatgcttggaaaaaatttttaaattcactagataattaaaatgagatgaacgaattcatctcattttctacatccacctatttctcgacacccaatttgggcgaaataggttttatgtcggctccatgacatcataacagaaataaaataaatgtcaactacgaattgtagggatggactcttaaaagttcatccatttcttttattgctgcttttttagacaaagatgaataattaaacaaaccaaatcctttatatccatttaaagaaagaatctgaacctgttgagaaatattgtcatcagctagcttccaaccttgatcaacatcatattcatcaccagcccgataaagtgcaagtcctgcataaagagcaacatcctgacaacgttttaatcctgcaaattgcttagcacgttgactaaacatttttgtttgtgactcaccatattggtcactccaataaatttgtggcatgacatagtcaacataaccttcttccttaagccaagtatcaacatctgccccttcatttatacaattttcataattaccttgaggactaatcccaaacgttacatctttatttattgctttaatacattgataaacatcacttatcaatgtattaacattatccaaccgttgattcttagttgttttcccatgggttccctcaatataaaaataatcatcaaaatgaatcccatctatcgcataattttcaacaatttccttgactcctgcaacaatataatctctaacctcttgactagctggatttaaaatatatttaaaaggttcataaccaatagttaactttgtatcttttaaccatgcactttttggtgattgactcataaactgttgatatgttgtttgatttaaagaaatacgataaggattaacccacgcttcaatcattaatcctttttgatgagcaatctttatcatttcttttaaaggatcaaaagataaagaagttttttgacagataacttgagatataggaaataattttgattgataaagagcatcactaaaaggacgtacttgtacaataacagtatttattttatatttttcaactcgatcaatagccgtctgaaaatctttagtaaaagctttttgagattcataagaaaactttgctaagtctgaataagaaaaccagattgctcgtttatcaaaagaagataaggaacatgctggctttggaaagaatacataaacaatgagacatacacaaacaagtacacctataactaataaactatgtttgttctttttcacaacaccacccctttcatcatattcaagaaatatccaataagtcctctggggttgttattttcttattttcataatctcctacaatcacataaacactctcatcactaaaatgctcaaccatttgggcatcatcagttgcctgatatccttcaagcattgcctttgtataagcatctaaaataacttttgtatcaaatgcttgtggtgtttgtgcttgcattaattgtgatctttgtaatgtttctacaacttttccattaatcaccttttttattgtatctttacaaggaaccatcaacaaacaagctttatgatattttaaacattctaacaatgaatcaatatattcctgttttacataaggtcttgctccatcatgaatcaatacttgatcatatttcaccttttgtaaaccttcaaatacactatcttgtcgttcttttcctccattaacaaattcaatacgtgcatcattagataacttcataaaatcttttctttcaaataactgtgtcacgacaataatctgaccacatttttcatcacttgtaaaacgttgtaaagtcatttcataaaccgtttgattcccaaaagaaaataacatcttattataatccaaaccagttcttgttcctttacctgcacacaaaataatcacactatacatcattcatcaccttcttttccattataacaagaaagacttcgtttgtcgaagtctatcaatcgatattcatttgtttttgatattgataatgattaatgatagcacaaagcattaaaggaatcataaatgtcaaaatcataacaaccaaaatcataaaatccattaacccatgaagatataaagataataaaatattaaaaagataaaataagcctaacaataaaatcattccatacaacaaaataatttcttttcttaaaatcttctttaaagcatcattttcataaccaattctttttaaagtcacaacaagcttttctctttctatcatttctgttgaaaaacgaaaaagtattgttaatgacaaaagacaatgtgttgctaaaaaagaaacatatatcaaaatcatatacaatgtattatcaatccccataacaaataacccaatcattaaaacatcacttgctatttggaaaacaatatgattttttttataaaaattaaatactttctcaaaagtggcggaaaatcaagggcttaagccactttgagaggaaaaacagttgagttttactacacatttactacaaacgaagagccttgtttatgacaaactaaaaatatgccaatccctataccgcaggtactcgaaaagttaggattgacataaacagaatatacaaaagggatatttcattcattcgtattgaaatatcccttgattttttatattcgtgaagtactgtaattaacggcgggcaccgcagtcgcagtattcgtagtcgacataggtctcgttgtgaccatggtcttcctgatgggaaccgacttgaacctgtttcgtttcgtagatggtttctgtacggtagttgccgatgtaaccagctttaataagctctttggcatgagcctttgcgtcgtcgatgttacttgcaatatatccatcttcagcgaagatgaagtttgttcctacagcgaccttttgtgtctcatagtcgggaaccgtcaccatgttggatacccacttctgtgcggtgtgctgtttccacgaatgctggtgagcaggtttgctcggcttgtcggaaccgctgtttccagagtttccagaattggagctggaagagtcttttttattggaatctgttgaactgttgttattatctttagtagttgaagtggtattggaattatccgtatttttatcggttttgctattttccttttcctctttcttattgtcactttcttttgaaacatcaactttttgttctgtttgggtttcggaattcttattatcatttggttttgaaacaaaataaattcctattatcaatgataatataatcaatactataactgtaattactattttcttatttttgttgatcatgtttttaaatttatccattagaaagtacctctctttcgttccttatcttttctatataatatcatttcgtaaatttacttttctgtatagtaatttttgttattctgtaatcgttcataacttcttcttactgtaacgttttgcttttttgttgtcgtatcctctatggaaagttcttttaaatcagaatcatactttccacagtgaacatagttggaaatatcctctttcaacaaattttcctttaatgtaaagaatttattaaacaaagcagttatcatgatttctatttttctctctttaaataattcttctattcttttatcttctgctttactagttgctaaaaagtactcatataatttaagatgttctttttcttcctctgttaaatcttctctcaatatcaaacctttcttatgtagctgttgtaattcatcaacacgaagatattttttctcattgaattggtcaaattgaagaagatacccctcatcttttgtcaaacctacttcatcccatgatttatagatttcattttcaatttcattaaattcttgtaattgctctgcaactaaaagtttatttggtctataattctttgatttaaaatttctttgaaaataacgaattgttatttcatcatttatatattcttctactatttttcttggataatactttcgctttccatttccgtcttgatacgttgcttctgaactatatctactcttgaaatctctttgcaattttcttttcaatgcttcaatttgcccagtattcatcttattttcaatttcaaaaactgtttttagaatttttataatttcatctattgaaaataaaccattattctcaaagtccttgtttttagccactattttccctcttctctttgaaaatgtcgcgaatatttttgtgtgtcgtaattattatagctattttgtcttcgtttgtcaaataaatgtcgtttcctatgcgtaaaaatagaaattataatgtaatcacaattgaaaagcgacaaataaatgtcattcatcaattgtagaaaggagagtgctaattatgttaaaacactcaaaccgctatgcggcaaccctcgtaaagggagaagattttttaaaagatactggaaataagtatcgcttaattagccagcgacaatataaaggaaaacccgataagggtattcccgctggtgtaactgtaacgcttcaaattatcgaagacaattccgaaccagttattgataaagcaactggacaggaaaaggataacaacctcttcgaaacatttgatgcaacaatagtaggtgtatcctatcctttggcttttcataaaggcgattacgttgctttggaagagttcaaggaagaaatcagctactatatcaattttaatctgatacttcgttttggtggtatcaggctgttgaaagcaatgaacacacaacataatggaggtggaaataatgttacaggacagacgaaataaattctttgtcctgtttgcttctgaaattcttatttgtatcattgttgggctggcaatggcgtttgtcatgccagcccataatttccctttacaactggatgtactgaagcaaacaggatataccttattaagcttatctttcatacagatttttacatatctagtttattggtttttttaccacaagggatataaaggtatgagatatgcctttgtacacgctaatatgatgagaaagcttcgtcttatgatattagaagcaagttccaaacatacgacacaggaatatgcaggagaggagagagttgcaaaactcccacgcattcaaatcatatttgatgacggcatgaccagaggaaaagtcatcataggaaattccatacgtcatcataagctgttagaagatatgaacatatcttctgcattaggaaagtatatcgtttctgaacagtatttttctgatgatatgaatacatatgtctatgaatttgaacttgcagaaacagaccagcttgcttttaagaattacaaagattttcagttgttatgttccaagcaagaaaacggaacattgttcattgacgatagaaatagagttccactacaccatacacttattgtaggttcgacaggttcaggaaagacatatgcaacatattcgttgattttacagttgttgaatttttcgactgtaccagagatatattttgcagacccaaaatgttctgctttatacgtggttggtaagtctatctcatgtgacaaaacagctggaagtaccaatgaaattgtattcctgcttcagcgtttctatgaagcaatgcaaaagcgtgaacaggaagcacaagagtatcttaacaacaaacttgacagtgattttaaggactggggtctgcaggctcacgtcttgattattgatgagttttcttcattccagtctgtagtaaatacccttgataaatttacaagagacagggtcaatatgtatctgacaaatattattcagaaaggcagacagctcggcttcttcatgtggataatcatgcagaaatcagacagcaagatattgccaacatatcttcgtgacaatcttgttttcaaggtcgtgctcggacaggctactgatacgacttatcagacagcctttgaagaatacgctgatctgccgaagcgaaattttcagcaagggcaaggcttatatacgttccaaggtttgacaaggcaaccgaaagtgtgttcattcccgaccttgaagtttgatattcttaaagctgtccgtactcggtagataactcattctgcgggggttatgtaataacccccgcagaacaagaataagaaccaaatacaaagaacaggaaaggaaaaatttatgaaatataaatctaccgtgaaagttggtatagatgaaatcacacttgtactgtttccaaatgaaaaagtccccccagatgaatggataatcaaagcagatgaaatactgggaagatttatcgatttatcaaagattgaagaattgttcggaaaaatgcaagaggctcaatatggcgttcagcaaggctatagtacaggactgacctttgaaaacaaaccttggcacatgagcatatcatggcatgaatacttgcagactatgggtatctgcataaaattttccgcttatgcttggtcggtatatcagtctactttttttgaaagatatggtaagagaatgaacattgctttatttctgaaaatgatacaaagtgatttctatatagcaagactttctaggattgatatgactgctgattatttcaactttcataaatgtttcaatcctaacacgatatatcagaacttgaaaagcggttcaattattgtcaaagactataagaaccgcagtatgataaaaacattcaatggagttgataaaaacggcattatctctaccttatatgtcggctcgaggaaatcgaatacaagatgttttacacgcatatacgataaaaaagcagagcagattgaaacaaaagggtttcgatatgaagaagcaatcaattgcaaaagctggatacgtcaggaagtcgtatttaagggaacttatgcacaccaaattacagaagaattattgaatattactgatgaaaaagaacttgtgcaatttatcgcacatcagattacagatagatacagattttatgatatacagactaaaaaagaaatgaaatatacaagagcacttctctatattatgaataacgctcagttcaatcatttatcaactgcaatcgcaaaagataatgaccttaagcgttcaataatatatcttctgaaaggttcgggattatgtcccacattttataaagcttttgaagtatggggagaaggtgcagacaaagaaattgcaaattatctttttgaatattatgaaaagttttacataccagaagcgaatcaaaaaaaggaaataaagtcatggataaagaaacacagaagcacattaagacagcagaccataacggaatatctgaaaggagtgtgggtatgatgaagaacactgttgttcctgtttgggaaaaatatatgcttacaatagaagaagcaagcaaatattttggtataggcgaaaataagcttcggcggattgtagatgaacataggggtgaaccatttatcttctacaacggacaaagaacccttatcaaaaggaaacagtttgaaaatgtgttgaatgaaatcgacaccatatagaaaaagagccttgaacatgatatactgaaaacagtcatattcaaggctctttccataaatgaaaggagttaaaagtatggaaaagagaaccgacaataaaggaagaatattaagaaacggagagagccaaagaaaagacggtagatatgcttacaaatatatagaaaacggtaaacctaaatttgtctattcctggaaactggtatctactgatagagtaccaaaaggaaaaagagattgtgtttcacttcgtgaaaaagtcaaaatgatagaaaaagatttatctgacggtattagtacctcaaacagaaacatgacagtatcacagctatatgaccgttatacaagaagcaaggcaaatgttagaaaaggtacacagactggcagaaaataccttaaagaagccttgcaaacagatattctggggaatatgagcattgataaggtaaaactatcagaagccaaagcatgggcatatagaatgagagaaaaatatgcttacagtacagtaaagaatatgaaaagaagcctgaatgctacctttcatcttgcgatacaggacgatttgcttagaaaaaatccttttgattttgctttgacggatgttattgaaaatgacaccaaaaagaaagaagcactgacaaaggaagagataaaagcacttcttgattttgcaaaaacagataaaacctataaagtctattatcctgcaatcgttattttattaaatacaggtttgcgtatctctgaattatgcggattgacgctttctgacattgattttgataatcgcacaattgatattaaccaccaattgaaaaaggataaagacggatactatacagaaccaccgaaaagtgtcagcggttatcgcaagatacctatgacagacttggtatttcaaactttgctggaagttataaaaaatagaaaaaatacacagcctattgttgttgacggttatagcgatttcctctttttgaacaggcagggattacctatgtataacgcatactattcatgtagattttcagcactttcaaaaaagtatcgtaaatatacaggaaaagaacttcctaatatcacaccgcatattttaagacatactttttgtacgaacatggcaaacaaaggaatgacgccaaataatctacagtatgttatggggcataagaatattactatgacactaggatattatgcacatggaagctatcaatcagcacaagccgaaatgaaacgattgactgcataatctactactaaatttactactttttagaacgttaaaaagtgatagtttaagccaaaatataaagcaatttaccgaatgaaaaaatgagaaaccctcataaaataaggctttaagacgatatgtgaagttttaagccttattgtaaaaattcattttatgtttcataaaaataatatctcgtcttaaaaagcctaaataaactaaagaaaggtaagaatctaatttttgttgaatccattgatccatatcaggaatgattatttgacctaagaattgatataacccaatcatcccaatcattgaaaataaaatagttgaagatgtttcttttccataaatatataataaaacaataggtcctacaaacatcactaaaataagaccttttttcatctgtttgctaaaatgaaaaggcaaagaaagtggttgttttaaagaagctctatcaccttgaataagcataacaattgagcttctataagcataaccaagatttaatattgtacaccagaaaacttcaaaagccatcatagataaagttacattcattccttcttgagaaaaggttatagttaaaggtaatagtgataataaaagataagaaagcaaaaaagcaatcggaatagcaagacaaaataaaataactgtctgagataatagaaagactgttaattgtcgaaaagttgccccacatactaattgaattgcaagctccttagattttttcttaacacaaaaatcattagcaaagaaaacacttagtaaacaaataaaaataacaaaaacacttagagttgttacaatactattatgactatcaataaaagtcattccaattgaaggagaacaggctatttgaaaaaagacaaacataaaaattgttgttaaaacaaaggttaaccaataaaataatgaacgttgaaaatcatctttaatagattggaaagcattttgaatcattattgaaaatgtctccttgattcagcagaatttaattcaacaatcttttgaaaatattcatcttgtgtaagactttcacgtttaatcatctgttcaatataaccatctttaatatagactaatctcgaagaataagaagcaataaaaggatcatgagagaccataataattgttgtttgataatcctcattgagcttcttcaacaacatcaataattcatgagagttttcactatctaaattaccagttggttcatcagcaataataatttgtggctgattaattaacgctctagcaatcgcagcacgttgtctttgtccccctgaacattggtaagggtatttgtttaaaagctgttcaatatttaattgtttagccattgcttggactctttggattatttgtgttctatcgatatgtgctaaagataatggcattgctatattttcaaagagtgtgtgagtatctaatagattaaagtcctgaaaaacaaaacctaagttttgataacgaaatttacctatttcatgtgaggacattgttcttatatcaatatcatgaatccttacccaaccagaagttggcatatcaatggttgaaatattattgataaatgtagacttcccacttccacttggtcccatgatacaaataaactcaccacttgtaacagtaaaatcaatcccatgcaatgcttcaaattcattttcactatgtaatccataaatctttgttaaattctttgcttgtaatatatattcactcattttattcacctaattataactctatcacaagttataaaagaacgaaagagtaatttccttcgttcttttatttatctatttttagaaacaatatatttcttcatttttgctaataaggctcttgctccaacggaagaatcataatcttctaaaatatcattaatcatcttttgggataattcaataggtgaattttgaattaaaatatcttttaaatcttttttctttaaaggttgataatgaatgacttcatcaatccgatttaaaaattcttgagaaaatgattcttttaatgtatttttagacatcatcgcttttttaaagccaactatagattgactattggacattacatttgatgtcataataatgattgtatctttaaaagatattttatgatgatgattatcttttaataagccttcatcaaaaacttgtaggaaaagatgcatgacttggggatgcgccttttctatttcatctaataaaagaatactattaggatataggataagatcatgaagcaatgaagattgatcatcataaccaatatagccaggtggagatccaataattttagaaacactggctggttcactatattccgacatatctaactttacaaaatgacgatgaagtaaatgagctaattctctagctgtttgggttttccctattccactacttcctactaataagtaaatgcctttaggcttggttggatggggatatttggcaagtgattctaatgattcaacaagtgtttcaattgcttgatcttgtcctttaatcacattttgtaattgtgcttgtaaatgttgataagataatttggttagtgtcattcctgttatttcttcaataacacattcaatatgttctctttgtaactcattttgttttaaaaacacggctttaacacaagctagatctaagacatcaatagccttatcagggaaaacacgagatatcagatagtcatcacataagtcaatgacatcatcgatgcattgttgagaaatctggatatgatgataatcaacatactgttgttttaatccttgtaagatagctctcgtttcttctttagtattctcatttaatttaatgactgcaaaacgacgattcatggcttgatctttttcaaaatacttataatattcttctattgttgtggcaccaataatggttaaatctcgtcttgctagataaggttttaaaatattagaagcatcaatagctccttctgctccaccagcccctattaaattatgaatttcatcaataaataatattgcatccttagctaaaataaccttatcaataatcttcttaaacttttcttcaaattcaccacgatactttgtcccagctacaatactagaaagacttaattcataaattactttatttttcaaggcatctggaacttcatgattattaatcttaatagctaatttctcaactaaagcagtctttcctactcctgctttaccaattaataaagcattgtttttctcttttttacaaagagttaaaaagagttgttctaactccttgtctctacctatcatttgtctttcttgttttttaactaattgattaaaatttgttaattcatgaattaaatctaattcatgtaaaagggatttttcttcacttaattcctttttgacttcatcaaaaggaacatgatatttattaagtaattcaacggcaacactttctttttgcatcagcatagcaatacataatgtatttaaagaaactttactttcttttttcactgtactcatactcatcgcatcttctaaaatctttttgacgacttcactatactccatataaaaaggttgtatatctttttcaccaaacaacctaacaatatcatcatagatcatttcatcagtaacttgatagactttcaatatctttgaaaacggacaatctttcattttcaaaagagacaaaagaagatgttcacttccaacactactatgtcctaaatcaaaagcaatactttcagcaatcacaattgctttctgtgctttttcatgaaattgtgtgagcatactacacctcttttcctttctatcatatgaactctatttgaaattattaaccatttccatctatttaatcaaattattcaagaacccaagataaaaaaataaatcaaatatatttttttatttttttgttaattttttccccacttttataaaaaatatgtcataatatatatgtcaggaagatatattttagcagttcaataaaatattagttttttgttcttttaacattaaatagcgcgagctttccaatttcccaattaaatatgttaaaagaatttgagactcctttctgaaaagaaaaatcaccaataactcggtgatttttttattgcttaatattttctttaaattgtccatagacaatataacgactatctgttccattataacaagtacttaacataataaatggtttttgtttttcacttattggagattgaacagaggcaatcttttgaatctcttttacatatttaggataatcaatgcctttttgatacattgaacttgttgatttaataacagctgatgccacggcatcataaacattcacactaccatcaggtaaataaatatatatagttgaatgctttttataataatcttctttgacaaaatatcttaagtcatgaaaacgagatccgtttttcatattatgaccataaataatagtattatcatcactaaaatctttcttatttatttcatctataaagactgaaccagctttattttttttcttatatatatctgtataaagatatgtatcatttgtttttcctttaaggatgggttcatcaatttttgtatctggtatatataaccaaccaataacatctggatttgttgcttgtaatgctttaaaattaactgctctttgaattggattttcttccttttctacaacatattcatcaatcaaattttcagattctttttcaatcgaataatattcatagaaaatctttcctaattgaaaagctgaataagcaaaaacacagacacaaataacaagaataacttttcttattttatctttcattaaacattaaacttgaagaacatgatgtctccatcttgccctacatattgtttcccttcttgacgaatcttacctgcatctcttaaagcatgttcactcttaaattccattaaatcatcatagctatatgtttcagccttaataaatcctttttggaaatcagtatgaataattcctgccatttctggagctaacataccttttttaaaagtccaagcacgaacttcatcagctccaacagtaaagaaagtattaagtccaagtaaagcataagcttctttgattaatttatccaaaccactttcatcaatacctaaatcttgcataaacatagctttttcttctttatctaatccaactaattcactttcaatcttagcacagataggaacaacatcgcatccttcttttgtcgcataatcttttaactgtacataataaggattgctatcaggattttctaaatcttcttcacctaaatttgctacgtagataagtggtttcattgttaataaagtatattgtttaacaatatcaatatcttctttagagaaattcattgttctagctggtttccctgcatctaagatttcttttaaaggttctaaaaccgccatttcagctttagcttctttatccccagatttagctttcttttcaatctttgcaattctcttttcaactgtttcaagatcagcaaaaattaattctaaattaattgtttccacatctctaattggatcaacatctccatcaacatgtgtaatgtctttgtctctaaaacaacgaacaacttcacatattgcatcagtttcacgaatatttgctaagaatttatttcctaaaccttcaccacgtgaagctcctttaaccaaaccagcaatatcagtaaattcaaatgttgtaggaattgtttttttaggattaaaaattcttgttaattcatctaaacgatgatcaggaacttccaccactccgacgtttggatcaatagttgcaaatggatagtttgctgcttccacttgcgcatttgtaattgcattaaataatgtagacttcccaacatttggtagtcctacgataccggctgttaatgccataaattatcactccttaacttcctatacattttatctaaaaacatgctaaaatacaagttatttctatttgtcttaaaggattgttttggttataatagaagcgaaagggtgatcatatggaacaattttatcaaacaacattggattatatcagaaaacatcctcaattaaaaaaatcagtcatctttatgactcaatatttcccatatatcactttttgtctttatccttgtgtccttgtttatctctatttaaacaagagtccttatttgagcgctgcaatctataaaccattaggggcttttctttttgtgaccatttttagaaagctcataaatcgtccacgtccttatgactgcatgaatattgaaccattggttggtcacaaacatggtgaatcttttccaagtcgtcataccttaagtgcttttattattgctttgatttgtttttatgccaatatagatgttggcatatttgctttgattgtggcaatgatattaagtggatgtcgtattcttgctggagttcattttataagtgatgttttggcaggaattgtcattgcgattgtttttttcgttatttaattcaaattttttaattatttgattgacaaagtttatttttatattatactgtacttaaaatattttaagtatcatcaaaggaggtgcaatatgttaagtaaagaattccaatctgtctataacatctttaagatgaacttctatgcttcaatgtgtgctaattcaaaagaattaaccatgcaggaagcatttagtttggatatcatttatatgttaggtcatcctacaatattagaatatgcgaaatatatggggatttctcaacccaatgcaacatataaaatcaatcaattgattgaaaaaggatatttgattaaagaagtaagtaaggaagataaaagatcttatcgtttacaagtcacaaagaagtttttagctttttatcgtgataatgatcgttttataaaaaaagtccttggtgatattgaaaatatttttacgtctgatgaagtaaaattactagaaaaaatgttacaaacaattaaagtggaaatgatacaaggagaaaaaaatgattaagattttaacagattctacatctgatattgatttaaaccaagctaaagaattaggaatagacattattccattgaaagtcattattaatggtcaagaatataaagaccgtattgatttacaacccgatgaattttatcatcttttaacaacaagtacgactttaccaacaacatctcaaccatccccacaagacttcttaactcattatgaggaagctaaaaaacatggggatagtgttattgtaatgacgctatcaagtgttattagtggaacttatcaaagtgccaatattgcggctgggattgcagaatatgatgatatttatgttattgatagtttagcaacaactcaaatgttaagattacttgttttaaaagctgttgctttacgtgatcaaaatatggatgttaaggatattgtcaaaactttagaagaatataaacatcgtattcgtatttatgcttttgttgatactttagaatatttatataaaggtggacgtttatctaagacagccgctaccgcaggaacattgcttaaatttaagccaattattggattaaaggatggaaaattagaaatgtttgctaaggcaagaggaacacaaaaagcaactgctaaaattattgacttgattcatgaagatggagacattgattttgatgaacctatctgtgttggatttactggtaatgatgatggtttagataaatttgaacaaattttaagagatgaatttggttttggagaagttctttatggttgtgttggtccagttattgggacacatgctggtccaggtgcacgtttaataagttatgttagaaaggaaatttagtttcctttttttattttcattttgtaaaaaaagcgaatattttttacaaaatttgatatgatgtaaaaccgaggtggaatatatgttagatattttaattaaagcttttggatttatacttattattgtgattggatttttattaaaatcaaagggaatatgtaaaagagaacatggacaatttttatcaacgatcatcatgaatattacattaccttgtgcacttttatcttcaattaataatttaaagattactcctgttttattgattgctttaatcattggattcatgggtaatgttattacgaatatcgttggttatctttcgtcaagtcatgaatcacctatgaataaagctctatcaatgattaatacttcgggatataatattggaacatttactttaccctttgtccaaacattctttccagcaagtgagattgcttatgtttgtctctttgatactggtaatgctttaatgtgtttaggaggaacatttacagccgcaagtactgttgtttcttctgatcaaaaacctactttttatagtattattaagaaattattttcttctattcctttttgtacatatattgttttattctttttatctttatttcatatttcaattccaacccaagttttaacggttaccagtattgcaggaaatgccaatgcatttttagctatgttaatgattggtattcttttagaagtgaaacttgatttttcacaaatgaaaacaatcttaaaaattcttatcaatcattatacaatttcaattattctttcattgattgtttattttcttttacctttagataacattgttagaaaaatgattgttttatgtttatttgctcctatttcagcagttgctcctgttttttcaacaaaacttggaagtcattcaccagttccagcagctgttaattcattaagtattatgataagtattcttattttaacttgtttaattcttatttttgcttaatagattatatatttaaaaatgagatagtgactatctcatttttgatatttcatatgtctaatataccattcttttaataacgtatttaacatatcatttaattggatttgttcttcagttgataacatatcaaacatatcttcatcatttgtttttttattggttattttctcataacctttttttgtaagagaaataatgtatcttcgtttatcacgttcatctttataacgctttatatattctctttgttcaagcttggcaataatttcactcattgaaccagcttctatatcaagaatttcttgtaattctcgttgggatatttctttatgttttaatagaatttctaatatgttttcttgacttctttttttacctgttttatgggttaagatatgtccacatttaatgagtttattggttaaatcttgttgaaaatatttttgtcctttttcacattgtaagttagataataaacagttttttgaacatattggacattgattattcataaatttggactcccaattgtttcatttctttttgaattaagaacatagtgattaaaaaagccaccaaatcagcaattggtacagcaataaagactccatataatccaaaaatcaatgaaagaattaaaataaatggaatcaataataagcattgtcttaataaatttaaaaagctggattgtttaaccatcccaatagcttgaaagaaatttgcacacattgtttgacaaccaacaataggtaaacaaataaaccaaattcttaaagctgtacttcctagtttaataatttctggttcttgattaaacattgaaataatcatacctgggaaaaattgaatagctaaaaaacctactactgaaataatacttgaagcaataattgtatattttaatgtttctttcacacgatcaactcttttagcaccaaaattataactaatgataggttgctgtccttgggtcataccaattaaaggcatcaacattaaagtttgaacactagtaataatacctactgtagaaattgctgtatctccaccatatttccctaatgttccattaatcacaatatttaataaactcgtagaaagctgcatcaaaaaggcaggtaagccagttttaagaatcatatatgttaaatgcttcttgagttttaaatgcgctaaacgacattgaatcatactacgcttaccaaataggaaagtgagttgccaaaccatacttaaaaattgtccaccaatcgttgctagagcagcaccttccatccccatatgacatttcacaatgaaaatataatcaaacacaatattaaatcctgctcctaacaattgtgaaaccattgcatttctagcatttccctgtgctcttgagaagttatttccacaaatcgccacacactgaaaaactgctccatataagataatacttaaatatgctcgtgcatgtggtaaaacagcctcactcgctcctaataatgtcaaaataggattcataaaaagattcccaaaaaccataaaaaccagaccaaaaagaactgtaatcatcaaggcatttccttgataatactgagcttcatcatcttccttagcacctaaagcaattgaaaaacgagttgctccaccaactccagccattaaactcaatgccattaaaataagcgttacaggataagatattgttattccagcaagtccaagtgaacccaattgtggtgcatttccaataaacattctatcaacaatattataaatagcattaacaatcattcctatcattgctggaatcgaaagttctattaacaaaggtaaaactttgccattttccattttatctttattcatataatcatctcctacatcagagttatcttaaactttcttcaaatatttgtcaaggtaccttactattagctaaagaaaaaagacaaatattgtctttttaaccttctaaaactttaacataatatgttctatttctaggaccatcaaattcacataaataaattccctgccatgttcctaaaattatttttccttcactaacaataaatgtctgacttgcattaaaaatagttgatttcatatgtgcatgtgaatttccctcaaaatgatgataatcaggatgattagttggaaaggctctttcaaagccattcaacatatctctcacaacatctggatcagcattttcattgattgtaataccggcagtggtatgtggtgtatataccacaataatcccatcttttatttgtgatttttttaaatcttcttgaatttgttgagtgatatcatgcatttgcattcttttagagaattgatattgatgtttaaataacatagtctatccaatctcctttgcataccatcgatcacaggcataatgtggaccttcagtaattggagcagctaatggaacaaaaccatttttaacataaaatttattggctgcaaccatgttggcaaatgtttctaaataaatcaatgtatagtgttttttagcaaattctattgataaatcaaggagttgttgagcaattccagttcctcttatttcttttcgacaatacattttttgtagttcacaaacatcatagtagccatcaaccggaccaattccacatcccccaacaacatgaccatctttttctacaactagatattgataaaaatgagagctatatgtttcataaaatttgtcaaggttaggatcttcccaggcacatccaggtttatcggcaccaaattcaattaaacaatctctaataagtttttctacttctgcattgtctttaggttctatttttctaattttcatctgctggaatcaccttttttaaacgtttttcaaaatctcgacgagagaacataataatcgctccacaacctaaacacttgattttaatatcagcacccattcgaataattttccattgattagatttcttacatggatgttgctttttcatttcaacaatatcatttaaattatattccatagatatttactcctctctattatgataagcttttaatgtattctccaataacatagctatagtcataggtcctattccacctggaacaggtgttatgtatgaaacaatatctttaacatcttgataatcgacatcaccacaaagtttatcattctcatcacgatccatccctacatctaaaaccactgcccctggtttgacataatccttagtaaagaattttgcttgcccaattgcggcaattaaaacatccgcacgttgacagacttcctttaaattttcagtacgtgaatgagcaattgtaactgttgcatttctttgtaagcaaagtaaagaaactggttttcctacaatattacttcttcctacaactaccacttctttacctgttaaatcataatgaatctcatctaataaaaccgtcatcccctgtggtgtacaaggtaccagtccatcttgtcccaagaataattttgcgacattgattggatgaaaaccatcgacatcttttttaggatcaattaaatctaagattctttcttcatgaatatgttgaggtaatggcaattgaactaaaattccatcaactgtttcatcatgatttaatctttctattacttggataagttcatcttctaaaacagattcatctaatctcattatttctgataacatgcctacataagcacaagctttttctttattacgtacatagacttgacttgcttgattatttcctactaatataacaactaatttaggaatcctttttccttcattttgtaactgttgtattttttgtttaatttcatctttacgctttaatgatacattttttccatcaatattcattcagaacccctccttctgattgacattattataattgaaattcactttattgtaaaccaaaatagaacatccctaagattccatgaacacattttctttataaccataaattataagaggaagtgatcttatgaattataaagaaacagtctatcgtgtttcttttttaaccatgatagttaattttattttatcagtatttaaattccttgctggtctttatggtcattcacatgcaatgatcagtgactctattcattcattgagtgatgttatgacgactatcgttgtaatgattggtgttcatttctcaagtatgccttctgatcatgaacatccttatggacatgaacgaatggaatgtattgcagccatgattttatctattttacttatttttactggtttacaaattggttacaatagtttcctatccatcattcatccccaagcattaactcctagtttcattgcactgattgctgcatttatctctattttcaccaaagaaatcatgtactggtatacgcgttattatgccaaacgaatccactcgccatcattaatggctgatgcttatcatcatcgtagtgatgctttatcttctattggtagtttgattgggattagtggtgctatgctaggtgttcaatggttggatccattagcgggagtttgtattagtttatgtgttttaaaacctggtatttcgattttttatgacgctactgtgaaaatggtggatcatagttgtgatgatattgtttataatcaattaattgattttattttaaaacaaaagaatgttatttcaattgattcattaaagacaaggttgtttagtgaaaaatattatgttgatttagaaattggggttgatgaaaacttctcattaaaaaaagctcatcaaattgctcatgaagtccatgatgccctagaaaaagcgtttcctgatattaaacattgtatgattcatgtaaatccaaaagcaaagtgacatttttctactatttcttatgacttatgataaaatggaattaagaggtgatggtcatgaaaaaactacttatttttttaacttgcttattaatgttttatccctctcatgtctttgcggattcaggtccaaagcctagtgttaaaataacaattcatggcttgcaggaaaaagcctatgtgacacttctttcaaaagaagcaagcactggaccttttggcgtttatgagaaagatgaagaaaataatcattttaacaatgaatttggtcctgatgaagtttggaaagcctttatcaattatcaggataaagatggtttttactttatttcctattttcaagaatgcacggatacatttcaatggaattactatccaccaaatgaatttaaagtgcttatttattttcctgaatcccaaagttttataaccagttcaaaatcatatgaacgttatgcttttgagagtttttataccatttcattagatcagcaagcatccttgatgacacaaaaaggtactcatgaagtcgatatggatatcaaacaagaaattttctttaatgaagtcacatatcattttatagaacgtgttgttgtaaccattcttattgaattactgattgctctttgtttccaaatcaagaaaaaaagagaattaaagattattgtgttaaccaatatagtgacacaaatattactcaattttatgttacaaatgttaagtgtctattatatatcagtctttgcttttctatgttatacacttttagagattgcagttatttatattgaagcaaaagtttatcaaaaatatatgaaagaccgtagtaaaggtgaactcataggttatgctactgttgctaatattctttccttgttaattggatttgctatataaaaaagccaagatatgtctgtttaaagatatatcttggtttttatgtaatttattttattcttttaataatgtctcttgcaattaagataccattagcccctgcttgagcaagtcctctggttaatccagcaccatctccgccaacatataatccatcaatttcactttcaaaaccttctctcacttttggtcttgctgaatagaattttgcttctacaccataaagtaaagtatgttcattggcaattcctggagtgacatgatcaagtgcttcaatcatttcaataattgatttcattgtattgtatggaagaaccaatcctaagtctcctggtacagcttcaggtaatgttggaattgtataaccttcttttaaacgtttttcagttgtacgtctccctcttttgatatcaccatatctttgtacaataatacttccatgtgataacatattggcaagtcttgcaacttcatgagcaaattcatttggttcattaaatggttcactaaaaacatgtgaaacaagtaatgcaaagtttgtattaggacttcctaattttggatcatgatatgcatgtccattcgctaacattgttcctgaatgattttccacaaccacatgcccacttggatttgaacagaaagtacgtacttttgttcctacagatgcattgtatacaaatttaccttcatataaattcttattaatttcatccataacaatattgtttgtttctacacgtacaccaatatcaacttgattattatataaatccaatccttgattctttaaaacttttgttaaccaagttgaaccatctctacctggtgctaacacaacataagatgctttaatttcttcaccattttctaatacaatcccttgtacacgattgttttctacaataatatctttaacagctgttttaaaagccatatcaatatgttcttttaattcattagacatttctgtcataattcttaagttttcttctgttccaaggtgtcttacttttgcacgaagaagctttaatccaactgcatatccacgtctttcaatatctttaatcttatctgttgtaggatcagtgatttcatgagttgctccatgttttaaatacaattcatcaacatattgaatcacttcttctacttcttggttatctaagtaatccgttaaccaaccaccaaattcactagtaatattgaattttccatctgaatatgcacctgctccaccaaaacctgaagttattgaacatgctggtaaacatcctggttcatgttctttaatttgtggacagcttttaattttcttgtcttttatcggacaatgacgatacataacatcatgacctttatcaactaaaagaacttttaagtctggatttttcaaatacaattcataacttgtcataattcctgctggtccagctccaacaataataacatcataacttttttgcataaaaaaacgcctcatttctgggcataaaatgaattatccttacttattatattcatattttgaaacaattgtcaacgaaaacaagtttcgacttctgataacttgttttcgttaacttttattgaaattgcttagccaattgctgataagctgcattatattttcgtttctgtaacatcgtaaagaaatacttatcaaacaataaatcaagcttctcacgaagcatctgcataaattccttcattggcatttgtgcttgttcaacaccatttacataaaaataaataatattatttataatctttgcagatttcatatcatgcttatcttgataactccaaccatctaaaagtgatgctaataaacttctgattctcaattcataaacagatctcatcaaaaacgcatgttcatcttttccatcagtaaaatcatcatagaaaatataatgttttatccattcttcttgaagatgagaataattgttttgataaaattcatattcttgagataataaatctgttaaatctgatgaacttaagattttatgatgaaaatcatgaaccaaataatattttttagatttctttccttttataagcaaaccagctttttcaattcccatttttccaataacttcataagattcatctattgagattgcttgatcctccatagcaaaatattgaggatttttttgtacaaattctgaatcattcaagtaaaaataaaaattaatatctttatttgaaataatagtaggcataggcatatcttgacaagataaaaattctaacaaatatttatttctttgttgaacagattgttttaaccaatttgatagatttggcatatcaattaaaagatttaaaaagttaagaaaatcttcagtttgttgtttgataatatgtatgttccaattcttggcatagtctagttgaataagttcatgatattgattttcatcaactgatatatttagtttagtcaattgacttaaaggactccaatcttgaataggacaattatagataattaattcagttaattgatgaagccaagaaagttgacttatatcagttaaaggattttcacttatatctaaactttttaattgttggaggtctaaaagaaatgatatgtcttttaattgtgtatttgccagaacaagtttttttaaagattgacaataagttaatggagagaaatcttgtatggtagtgtaatgagttgcattgagatttgttaaatttgaagcataagacaaaacatcaattgaatctattatactaaaatcatgagaatagtatggacaatattttgtaaaatctaagactttgattttttgtatatcttcaattgtaataggtgaaagagaaggacgtgaaaaacaattattgatatagtaacgtaaacgattgttttttataaatagtttttgtcttaaatcttgtttatcgatattttcataaagatattgtttatatttttgtggattttgacttaaaatagttctgacacattcacgaatatcttgattttgatgatttttaaaagcaagtatttcatccaagttttcatctaaataataagataagatagataatgaacgaaggattattggaatactatttaatgataatagagttttgatttctgtcttataatgcatgattgaatctttttgataggtttcaataatttctagccaatataaatacatttcacaatcatctatatttaagaataattgatgaagcatattttcacattgttcatccccttgataacaaaataaagcagctaaattcaattgttgtgcttgattagcattcgtataatattcatgtaattgattgaatgaaatttgtgataatcctttaaatttatagagtgaatataatgttttatcaaaatcatcagataaatgtgcaagaacattctcttgatttcctaagaattgaatcccaaaatactgtgtatcatatccacttaatgtttcactcaagaaagctctataccattcatcaaaagaagcatagaactgtggtaaataatctagatgatccaaatcaatacttaccatttgtccataatattcgccttgacaatataatccatgtaaaacgtggcaatcagctaccaacaataataaaccatttccataatcatatccctgtttaatcatattttgccattcttgaattgttgtatagggcgttaagcttggctctttatcattataataataaaaagcaatttctaatggctgtaaaccacttgatggaccaaaacctccatcaccaaaatgcattaagaattgttgatattctaaagggatttgaacttgatattgatgttcatatttacgaatatcttgttgtgtgagtggttgataaaaagatacatctattccttgtgacaataattcatttatttttgattgcatgataaacacctctttttttattatgtatcaaataaaaagaaaaagccagtattcgtactggttaaacaagaaataatgcaacaatcagaggaatcgtaacaacagataataatgttgtcataaaaacagtttttgctgctaaagaaatatccccatcatattcagttgcaaacaatacagcactattggcaactggcattgatatcataattaaagtaatacctaatattaatggatcactaataaacatatttaaaattggataagcaataatagggacaataacctgtttaataattgtataaggatatatacgtaattcactaaaaacttcttttaatggaatattggcaagtgttgagccaatcagaagcattgccattggtgttgtaatatctcctaccattgttattgtggaggctaaaacatgaggaacatgaatacctgtaaaatatatcaataaagcaaccaatgaagcaacaactccaggtgataataaattttttggatcaagtttcactttttgccctgttccataattcataatcataacgccaccagtaaaaacaaataaattaaatatcatattaaatattgcagtaaagaaaactgcttcatttccaaatattgctttcattacaggaaatcccataaacccaatattagaaaacactgtcataaatatgtataacccttgttgtggtaaagggactctcataatcttaacaatgatataacctaaaattggcataattaaataaacagcaaaaccaactaaaaatacaaataaaatatcattaagtccttgtgtcacagttgtggacaaaacagatgaaacaatcattgctggtgttgttactgatagtaacaatgttgtaagttttttatttaaatcaacatctaatagcttaatcttaaataagaaataccccaaagcaataactaaaaacaattgtatcatctgcattaatataacccgaatatccacaacttatccccctaaccttttaatccacttgcttgtctttccatattttctactacaacatcatagatttctccaagtgtcgcagcatattctaaaaccttccaaggttcatttgtatgataatgaatcttaattaattcatcatcacctacagctaataaacaatctccttgaaaattctcagtaatataatcattaatttcatcttcatttaagttttgaccttcaattaataattgtgtgtcaaatttatattctaacattattcttctccttcaaataagcaagcaccattcgtttcaatcacatgcttataccaatcaaatgatttcttcttatatcgtttatatgttccatttccttcatcatcacaatctacataaatgaaaccataacgtttactcatttgttttgttgattcactgacaatatcaatacatccccaagatgtatatcccattaaatcaactccatctatttctatagcatttaacatttctctaaaatgagcatcaaagtaatcaatacgatattgatcatctactgttccattgactaattcatcttttgctcctaatccattttcaacaataaataatggttttctataacgatcatataaatctactaatgaaattctaagtccaattggatcaatttgccatccccaatcagagcttgggatgtgtggatttttaatcgcaatcatagtattagcagcagttgtctttaaaccatcagcattcttagccacacagctactagaataataactaaatgaaacaaagtcaacaggatattgtttcataatatccaaatctccttcttccatcttaatatgaataccttcatttttaaatttggcaagcaagtaggcaggatattctccaaacacttgtgtatcactatagcagtatgtgcttcgcatatcttgttgagcttgtaagacatcttc
